(19) United States
(12) Patent Application Publication
(10) Pub. No.: US 2010/0290996 A1
(43) Pub. Date: Nov. 18, 2010

(54) METHODS AND COMPOSITIONS BASED ON CULTURING MICROORGANISMS IN LOW SEDIMENTAL FLUID SHEAR CONDITIONS

(75) Inventors: Cheryl A. Nickerson, Phoenix, AZ (US); James W. Wilson, Wilmington, DE (US); Mark C. Ott, Houston, TX (US); Eric A. Nauman, West Lafayette, IN (US); Michael J. Schurr, Aurora, CO (US); Mayra A. Nelman-Gonzalez, Seabrook, TX (US); Shameema Sarker, Chandler, AZ (US)

Correspondence Address: GEORGE A LEONE, SR;CITADEL PATENT LAW, 9124 Gravelly Lake Drive SW, SUITE 102, Lakewood, WA, 98499, US

(73) Assignee: Arizona Board of Regents, for and on behalf of Arizona State University, Tempe, AZ (US)

(21) Appl. No.: 12/676,209

(22) PCT Filed: Sep. 10, 2008
(86) PCT No.: PCT/US08/75818

§ 371 Date: Jul. 26, 2010

Related U.S. Application Data
(60) Provisional application No. 60/993,208, filed on Sep. 10, 2007.
(60) Provisional application No. 61/079,160, filed on Jul. 9, 2008.
(60) Provisional application No. 61/032,252, filed on Feb. 28, 2008.
(60) Provisional application No. 61/045,419, filed on Apr. 16, 2008.

(51) Int. Cl. A61K 49/00; A61K 39/112; C12Q 1/68; G01N 33/53; C12Q 1/02; C12Q 1/18; C12N 1/20; C12N 1/18; C12N 1/16; C40B 30/04

(52) U.S. Cl. 424/9.2; 424/235.1; 435/6; 435/7.1; 435/29; 435/32; 435/252.8; 435/253.3; 435/253.4; 435/255.2; 435/255.21; 435/255.4; 506/9

(57) ABSTRACT

This invention is directed to applying a low sedimental fluid shear environment to manipulate microorganisms, and to microorganisms and compositions obtained based on such manipulation. Specifically, the present invention provides methods of modifying a molecular genetic or phenotypic characteristic (e.g., virulence, stress resistance or biofilm formation) of a microorganism by culturing in a low sedimental shear environment. One or more ion concentrations in the culture can be modulated in order to inhibit or amplify the extent of the modification. The present invention also provides microorganisms obtained from a low sedimental shear culture, which exhibit modified and desirable phenotypic characteristics, as well as therapeutic, vaccine and bioindustrial products prepared from such microorganisms. Further, the present invention provides methods for identifying molecules that modulate responses of a microorganism to a low sedimental shear environment and for determining the relevance of such molecules to pathogenenicity of the microorganism.

### STATEMENT REGARDING FEDERALLY SPONSORED RESEARCH OR DEVELOPMENT

[0001] This invention was made with Government support under Contract No. NASA grant NCC2-1362 awarded by the United States NASA. The Government has certain rights in this invention.

### FIELD OF THE INVENTION

[0002] This invention generally relates to microbial culturing. More particularly, the present invention is directed to applying a low sedimental fluid shear environment to manipulate microorganisms. Microorganisms obtained from a low sedimental fluid shear culture, which exhibit modified phenotypic and molecular genetic characteristics, are useful for the development of novel and improved diagnostics, therapeutics, vaccines and bioindustrial products. Further, application of low sedimental fluid conditions to microorganisms permits identification of molecules uniquely expressed under these conditions, providing a basis for the design of new therapeutic targets.

### BACKGROUND OF THE INVENTION

[0003] Environmental conditions and crewmember immune dysfunction associated with spaceflight may increase the risk of infectious disease during a long-duration mission. Previous studies using the enteric bacterial pathogen, Salmonella enterica serovar Typhimurium, showed that growth in a ground-based spaceflight analog bioreactor, termed the rotating wall vessel (RWV), induced molecular genetic and phenotypic changes in this organism. Specifically, S. typhimurium grown in this spaceflight analog culture environment, described as low shear modeled microgravity (LSMMG), exhibited increased virulence, increased resistance to environmental stresses (acid, osmotic, and thermal), increased survival in macrophages, and global changes in gene expression at the transcriptional and translational levels. However, our knowledge of microbial changes in response to spaceflight or spaceflight analog conditions and the corresponding changes to infectious disease risk is still limited and unclear. Elucidation of such risks and the mechanisms behind any spaceflight or spaceflight analog-induced changes to microbial pathogens holds the potential to decrease risk for human exploration of space and provide insight into how pathogens cause infections in Earth-based environments.

### SUMMARY OF THE INVENTION

[0004] The present invention is directed to applying a low sedimental shear environment to manipulate microorganisms, and to microorganisms and compositions obtained based on such manipulation.

[0005] In one aspect, the present invention provides a method for modifying or manipulating a microorganism by culturing the microorganism under low sedimental fluid shear conditions, and harvesting the cultured microorganism. The present method applies to microorganism including but not limited to bacteria, viruses, fungi, protozoa, protists, and worms (such as helminthes), among others. Examples of microorganisms contemplated by the present invention include Salmonella sp. (particularly Salmonella typhimurium), Streptococcus pneumoniae, Pseudomonas aeruginosa, Candida albicans, and Saccharomyces cerevisiae.

[0006] In one embodiment, the fluid shear level in the low sedimental shear environment in which the microorganism is being cultured is adjusted to be 100 dynes per cm² or lower, preferably lower than 50 dynes per cm², more preferably lower than 20 dynes per cm², even more preferably 10 dynes per cm² or lower, or even lower than 0.1 dynes per cm².

[0007] In another aspect, the present invention provides methods of modifying a phenotypic characteristic of a microorganism by culturing the microorganism in low sedimental shear environments. Phenotypic characteristics that can be modified in accordance with the present invention include but are not limited to, virulence, immunogenicity, stress resistance (such as thermal, acid or oxidative stress resistance), resistance to drugs including anti-microbial compounds (e.g., resistance of a fungus to an anti-fungal compound), ability of a bacterium to form biofilm in culture, metabolic capabilities, among others.

[0008] In a specific embodiment, low sedimental shear conditions are applied to an attenuated vaccine strain of a microorganism to enhance the efficacy of the vaccine strain.

[0009] In a further aspect, the present invention is directed to the modulation of one or more ion concentrations to manipulate, e.g., to amplify or inhibit, responses of microorganisms to low sedimental shear environments. Ions which can be manipulated to achieve modification of microorganisms include but are not limited to phosphate, chloride, sulfate/sulfur, bromide, nitrate-n, o-phosphate, pH/hydrogen ion, calcium, chromium, copper, iron, lithium, fluoride, magnesium, manganese, molybdenum, nickel, potassium, sodium and zinc, among others.

[0010] In another aspect, the present invention provides microorganisms harvested from a low sedimental shear culture.

[0011] In still another aspect, the present invention provides a therapeutic composition, including a vaccine composition, comprised of a microorganism obtained from a low sedimental shear culture. Microorganisms suitable for use in the therapeutic composition of the present invention include, for example, Salmonella sp. (particularly Salmonella typhimurium), including an attenuated Salmonella vaccine strain, Streptococcus pneumonia, Pseudomonas aeruginosa, Candida albicans and Saccharomyces cerevisiae, harvested from a culture grown under low sedimental shear conditions.

[0012] In another aspect, the present invention provides other compositions formulated with a microorganism obtained from a low sedimental shear culture, useful for various bioindustrial applications.

[0013] In a further aspect, the present invention provides a method for identifying a gene of a microorganism which modulates the response of the microorganism to low sedimental shear environments. The method includes culturing the microorganism in a low sedimental shear environment, comparing expression of candidate genes in the microorganism in the low sedimental shear environment relative to control sedimental shear conditions, and identifying genes that exhibit differential expression. Functional categories of genes that have been or can be identified as differentially expressed in accordance with the present invention include, without limitation, virulence genes, iron metabolism genes, ion response or utilization genes, cell surface polysaccharide genes, protein secretion genes, flagellar genes, stress genes, genes coding for ribosomal proteins, genes coding for fimbrial proteins, transcriptional regulator genes, genes involved in extracellular matrix/biofilm synthesis, stress response genes, sigma factors, genes encoding RNA binding proteins, genes encoding small noncoding regulatory RNAs (small RNAs), DNA polymerase genes, RNA polymerase genes, plasmid transfer/conjugation genes, chaperone proteins, carbon utilization genes, Metabolic pathway genes, energy metabolism genes, chemotaxis genes, genes encoding heat shock proteins, genes encoding putative proteins, genes encoding recombination proteins, genes encoding transport system proteins, genes encoding membrane proteins, genes encoding cell wall components (including LPS), housekeeping genes, genes encoding structural proteins and enzymes, and plasmid genes.

[0014] In another aspect, the present invention is directed to the use of a host, including during space flight, to study interactions between the host and a microorganism pathogen or an attenuated vaccine strain when both are simultaneously placed in a low sedimental shear environment. The pathogen can, for this purpose, also have been manipulated in an RWV or similar analog. According to this aspect of the invention, hosts include animals, animal analogs, plants, insects, and cell and/or tissue cultures from animals, animal analogs or plants.

### BRIEF DESCRIPTION OF THE DRAWINGS

[0015] FIG. 1. Experimental setup for STS-115 Salmonella typhimurium microarray and virulence experiments. This flowchart displays a timeline of how STS experiments were designed and organized. Fluid processing apparatuses (FPAs) were loaded as in FIG. 2 and delivered to Shuttle, activated during spaceflight, and recovered upon landing as outlined in the flowchart. A more detailed description of the FPA activation and fixation/supplementation steps is provided in FIG. 2. OES: Orbital Environmental Simulator (this is a climate-controlled room at Kennedy Space Center that houses ground controls and is maintained at the same temperature and humidity as the Space Shuttle via real-time communications). STS: Space Transport System, refers here to the Shuttle. SLSL: Space Life Sciences Lab.

[0016] FIG. 2A-2C. Diagram and photographs of fluid processing apparatuses (FPAs) used in the STS experiments. Panel 2A: Schematic diagram of an FPA. An FPA consists of a glass barrel that contains a short bevel on one side and stoppers inside that separate individual chambers containing fluids used in the experiment. The glass barrel loaded with stoppers and fluids is housed inside a lexan sheath containing a plunger that pushes on the top stopper to facilitate mixing of fluids at the bevel. The bottom stopper in the glass barrel (and also the bottom of the lexan sheath) is designed to contain a gas-permeable membrane that allows air exchange during bacterial growth. In the STS experiments, the bottom chamber contained media, the middle chamber contained the bacterial inoculum suspended in PBS (or water for yeast/fungi), and the top chamber contained either RNA/protein fixative or additional media. Upon activation, the plunger was pushed down so that only the middle chamber fluid was mixed with the bottom chamber to allow media inoculation and bacterial growth. At this step, the plunger was pushed until the bottom of the middle rubber stopper was at the top part of the bevel. After the 25-hour growth period, the plunger was pushed until the bottom of the top rubber stopper was at the top part of the bevel such that the top chamber fluid was added. Panel 2B: Photograph of FPAs in pre-flight configuration. Panel 2C: Photograph of FPAs in post-flight configuration showing that all stoppers have been pushed together and the entire fluid sample is in the bottom chamber.

[0017] FIGS. 3A-3C. The rotating wall vessel (RWV) bioreactor and power supply. Panel 3A: The cylindrical culture vessel is completely filled with culture medium through ports on the face of the vessel and operates by rotating around a central axis. Cultures are aerated through a hydrophobic membrane that covers the back of the cylinder. The power supply is shown below the bioreactor. Panel 3B: The two operating orientations of the RWV are depicted. In the LSMMG orientation (panel i), the axis of rotation of the RWV is perpendicular to the direction of the gravity force vector. In the normal gravity (or 1×g) orientation (panel ii), the axis of rotation is parallel with the gravity vector. Panel 3C: The effect of RWV rotation on particle suspension is depicted. When the RWV is not rotating, or rotating in the 1×g orientation (panel i), the force of gravity will cause particles in apparatus to sediment and eventually settle on the bottom of the RWV. When the RWV is rotating in the LSMMG position (panel ii), particles are continually suspended in the media. The media within the RWV rotates as a single body, and the sedimentation of the particle due to gravity is offset by the upward forces of rotation. The result is low shear aqueous suspension that is strikingly similar to what would occur in true microgravity, and is also relevant to certain areas in the human body, including those routinely encountered by pathogens—such as GI and urogenital tracts.

[0018] FIGS. 4A-4E. Data from STS-115 Salmonella typhimurium experiments. Panel 4A: Map of the 4.8 Mb circular Salmonella typhimurium genome with the locations of the genes belonging to the spaceflight transcriptional stimulon indicated as black hatch marks. Panel 4B: Decreased time-to-death in mice infected with flight S. typhimurium as compared to identical ground controls. Female Balb/c mice perorally infected with 10⁷ bacteria from either spaceflight or ground cultures were monitored every 6-12 hours over a 30 day period and the percent survival of the mice in each group was graphed versus number of days. Panel 4C: Increased percent mortality of mice infected with spaceflight cultures across a range of infection dosages. Groups of mice were infected with increasing dosages of bacteria from spaceflight and ground cultures and monitored for survival over 30 days. The percent mortality (calculated as in (23)) of each dosage group is graphed versus the dosage amount. Panel 4D: Decreased LD₅₀ value (calculated as in (23)) for spaceflight bacteria in murine infection model. Panel 4E: Scanning electron microscopy (3500× magnification) of spaceflight and ground S. typhimurium bacteria showing the formation of an extracellular matrix and associated cellular aggregation of spaceflight cells relevant to biofilm formation.

[0019] FIGS. 5A-5B. Hfq is required for S. typhimurium LSMMG-induced phenotypes in RWV culture. Panel 5A: The survival ratio of wild type and isogenic hfq, hfq 3′ Cm, and invA mutant strains in acid stress after RWV culture in the LSMMG and 1×g positions is plotted (ANOVA p-value<0.05). Panel 5B: Fold intracellular replication of S. typhimurium strains hfq 3′Cm and Δhfq in J774 macrophages after RWV culture as above. Intracellular bacteria were quantitated at 2 hours and 24 hours post-infection, and the fold increase in bacterial numbers between those two time periods was calculated (ANOVA p-value<0.05).

[0020] FIGS. 6A-6C. Increased virulence of S. typhimurium in response to spaceflight in LB medium is not observed in M9 minimal medium or LB medium supplemented with M9 salts. 6A, Ratio of LD₅₀ values of S. typhimurium spaceflight and ground cultures grown in LB, M9, or LB-M9 salts media. Female Balb/c mice were perorally infected with a range of bacterial doses from either spaceflight or ground cultures and monitored over a 30-day period for survival. 6B, Time-to-death curves of mice infected with spaceflight and ground cultures from STS-115 (infectious dosage: 10⁷ bacteria for both media). 6C, Time-to-death curves of mice infected with spaceflight and ground cultures from STS-123 (infectious dosage: 10⁶ bacteria for LB and 10⁷bacteria for M9 and LB-M9 salts).

[0021] FIG. 7. qRT-PCR analysis of S. typhimurium genes altered in response to spaceflight as compared to ground controls in LB and M9 cultures. Total RNA harvested from spaceflight and ground cultures in the indicated media was converted to single-stranded cDNA and used as a template in qRT-PCR analysis with primers hybridizing to the indicated genes. PCR product levels were normalized to the 16S rRNA product and a ratio of each gene level in flight and ground cultures was calculated. All differences in expression between spaceflight and ground cultures were found to be statistically significant using student's t-test (p-value<0.05).

[0022] FIG. 8. Altered acid tolerance of S. typhimurium in ground-based spaceflight analog culture is not observed in the presence of increased phosphate ion concentration. Cultures of S. typhimurium grown in the indicated medium in the rotating wall vessel in the low-shear modeled microgravity (LSMMG) or control orientation were subjected to acid stress (pH 3.5) immediately upon removal from the apparatus. A ratio of percent survival of the bacteria cultured at each orientation in each media is presented.

[0023] FIG. 9. Microscopic images of cells of a recombinant attenuated Salmonella anti-pneumococcal vaccine strain scraped off of the hydrophobic membranes of the RWV cultured in 1×G or LSMMG conditions.

[0024] FIG. 10. Scanning electron microscopy (SEM) shows profound hyphal formation of C. albicans during spaceflight culture—but no hyphal formation is evident during ground culture of identical controls.

### DETAILED DESCRIPTION OF THE INVENTION

[0025] The present invention is predicated in part on the discovery of global changes in microorganisms which resulted from growth in spaceflight or spaceflight analogs which produce low sedimental shear environments around the microorganisms, including phenotypic (such as virulence and stress resistance) and molecular genetic (gene expression) changes. Specifically, during spaceflight aboard the Space Shuttle mission STS-115 and STS-123 and on the ground using a spaceflight analogue bioreactor, the Rotating Wall Vessel, changes were observed in gene expression (mRNA and protein), virulence, and stress resistance using the microorganism Salmonella typhimurium, for example. Further, a conserved global regulator, the Hfq protein, has been identified to be involved in the response to the environment of low sedimental shear stress during spaceflight and spaceflight analogue culture. Conventional culture conditions, which are currently available in the marketplace, do not have the capability to grow microorganisms in low sedimental shear environments, and therefore are unable to recapitulate low fluid shear levels found within an infected host. The recognition of the phenotypic and molecular genetic changes of microorganisms in response to low sedimental shear environments allows the development of modified microorganism with desirable and improved phenotypic characteristics, such as enhanced immunogenicity and protection against infection, altered stress resistance, altered metabolic capabilities, and altered ability to form biofilms. The modified microorganism can be used in formulating therapeutic and vaccine compositions, as well as bioindustrial products. Further, the use of low sedimental shear environments in accordance with the present invention permits identification of novel target molecules for vaccine and therapeutic development, which would not have been possible using conventional culture conditions.

[0026] In one aspect, the present invention provides a method for modifying or manipulating a microorganism by culturing the microorganism under low sedimental fluid shear conditions, and harvesting the cultured microorganism. This aspect of the invention excludes culturing a Salmonella sp., particularly a wild type (i.e., naturally occurring, unmodified Salmonella sp.) in a low sedimental fluid shear environment created by a rotating wall vessel bioreactor.

[0027] “Low sedimental fluid shear conditions” and “low sedimental fluid shear environments”, or in short, “low sedimental shear” conditions or environments, contemplated by the present invention include space flight and space flight analogs which produce low sedimental shear environments. Examples of space flight analog include commercial analog bioreactors such as rotating wall vessels (RWV), and other art-recognized low sedimental shear environments as understood by the skilled artisan. The RWV is a rotating bioreactor (FIG. 3) in which cells are maintained in suspension in a gentle fluid orbit that creates a sustained low-fluid-shear and microgravity environment. The level of fluid shear force within the bioreactor can be increased in a controlled and quantitative manner by adding beads (e.g., polypropylene beads) of a selected size to the RWV (Nauman et al., Applied and Environmental Microbiology 73: 699-705, 2007). By using beads of different sizes, a range of fluid shear levels can be achieved, which can be relevant to those encountered by a microorganism in an infected host. For example, fluid shear levels in the RWV can be adjusted from lower than 0.01 dynes per cm² in the absence of beads, to 5.2 dynes per cm² by adding 3/32-inch beads, to 7.8 dynes per cm² by adding ⅛-inch beads, as determined and described by Nauman et al. (2007), incorporated herein in its entirety by reference. According to the present invention, fluid shear levels of 100 dynes per cm² or lower, preferably lower than 50 dynes per cm², more preferably lower than 20 dynes per cm², even more preferably 10 dynes per cm² or lower, or even lower than 0.1 dynes per cm², are considered low shear levels.

[0028] The term “microorganism” includes bacteria, viruses, fungi, protozoa, protists, and worms (such as helminthes), among others. Examples of microorganisms contemplated by the present invention include Salmonella sp. (particularly Salmonella typhimurium), Streptococcus pneumoniae, Pseudomonas aeruginosa, Candida albicans, and Saccharomyces cerevisiae.

[0029] In one embodiment, modification of the microorganism is achieved by altering the fluid shear levels in the low sedimental shear environment in which the microorganism is being cultured. The fluid shear level in the culture can be adjusted to 100 dynes per cm² or lower, preferably lower than 50 dynes per cm², more preferably lower than 20 dynes per cm², even more preferably 10 dynes per cm² or lower, or even lower than 0.1 dynes per cm².

[0030] In accordance with the present invention, culturing a microorganism in low sedimental shear environments induces both phenotypic and molecular genetic changes. Accordingly, in a further aspect, the present invention provides methods of modifying a phenotypic characteristic of a microorganism by culturing the microorganism in low sedimental shear environments.

[0031] A “phenotypic characteristic” of a microorganism, as would be understood by those skilled in the art, include any observable or detectable physical or biochemical characteristics of a microorganism, including but not limited to, virulence, immunogenicity, stress resistance (such as thermal, acid or oxidative stress resistance), resistance to drugs including anti-microbial compounds (e.g., resistance of a fungus to an anti-fungal compound), ability of a bacterium to form biofilm in culture, among others.

[0032] Changes in phenotypic characteristics are often associated with or caused by molecular genetic changes. As used herein, the term “molecular genetic changes” refer to changes in gene expression, which manifest at any or a combination of mRNA, rRNA, tRNA, small non-coding RNA levels and protein levels.

[0033] The present inventors have demonstrated global changes in gene expression, virulence and stress resistance characteristics of Salmonella typhimurium, which resulted from growth in a spaceflight or spaceflight analog (RWV) which produces low sedimental shear environments around the cells. A conserved global regulator, the Hfq protein, has been identified to be involved in the response to the environment of low sedimental shear stress during spaceflight and spaceflight analogue culture. While Salmonella typhimurium has been used as an example to illustrate the phenotypic and genetic changes, due to the nature of the effect and the conservation of global regulators between different organisms, multiple organisms should display similar changes in characteristics in response to low sedimental shear environments.

[0034] In one embodiment, low sedimental shear conditions are applied to a microorganism to alter (increase or decrease) the virulence of the microorganism. In a specific embodiment, low sedimental shear conditions are applied to a microorganism to increase the virulence of the microorganism. By “virulence” it is meant the ability of a microorganism to cause disease. Virulence of a microorganism can be determined by any of the art-recognized methods, including suitable animal models. The ability of low sedimental shear conditions to increase virulence of a microorganism allows for the development of new therapeutic compositions. Without being bound to any particular theory, the global changes of a microorganism resulting from culturing in a low sedimental shear environment may include expression of antigens by the microorganism that would not be expressed under conventional culturing conditions but are possibly expressed during infection of a host by the microorganism. In addition, a microorganism exhibits enhanced stress resistance and improved ability of survival after being cultured in a low sedimental shear environment. As a result, a vaccine prepared using such microorganism is able to survive longer in a recipient host to induce desirable protective immunity.

[0035] In one embodiment, low sedimental shear conditions are applied to an attenuated vaccine strain of microorganism to enhance the efficacy of the vaccine strain. Enhanced vaccine efficacy includes, but is not limited to improved immunogenicity (i.e. ability of the vaccine strain to provoke immune response), and/or improved protection against subsequent challenges. Attenuated microbial vaccine strains are well-documented in the art and can be prepared by various well-known methods, such as serial passaging or site-directed mutagenesis.

[0036] In a specific embodiment, the present invention provides a method of enhancing the immunogenicity and/or protection of an attenuated Salmonella vaccine strain by culturing the attenuated Salmonella vaccine strain in a low sedimental shear environment and harvesting the cultured strain.

[0037] In another specific embodiment, the present invention provides a method of enhancing the immunogenicity and/or protection of a recombinant attenuated Salmonella vaccine strain expressing one or more antigens from other pathogens by culturing the attenuated recombinant Salmonella vaccine strain in a low sedimental shear environment and harvesting the cultured strain.

[0038] In another embodiment, low sedimental shear conditions are applied to a microorganism to enhance stress resistance of the microorganism. The resulting, more resilient microorganism is particularly useful for the development of biomedical products like vaccines and bioindustrial products, such as biofuels. Enhanced performance and robustness of consortia of microorganisms are also useful for bioremediation.

[0039] In still another embodiment, low sedimental shear conditions are applied to a microorganism to modify the ability of the microorganism to form biofilm. In a specific embodiment, low sedimental shear conditions are applied to a microorganism to enhance the ability of the microorganism to form biofilm. As illustrated hereinbelow, S. typhimurium strain X3339, which does not form biofilm when cultured in the LB medium in ground, is able to form biofilm after grown in spaceflight. On the other hand, an attenuated S. typhimurium strain vaccine strain X9558pYA4088, which forms biofilm in 1×g culture in the RWV, showed reduced ability to form biofilm after grown in LSMMG. Accordingly, one could employ low sedimental shear conditions to manipulate the ability of the microorganism to form biofilm, either to increase such ability in order to develop bioindustrial products useful for sewage treatment and pollution control, or to decrease the ability to form biofilm. Altered biofilm production could be important for enhanced efficacy and robustness of microbial consortia for bioremediation, sewage treatment, microbial fuel cells, and possibly vaccines.

[0040] In a further aspect, the present invention is directed to the modulation of one or more ion concentrations to manipulate, e.g., to amplify or inhibit, responses of microorganisms to low sedimental shear environments.

[0041] The present inventors have discovered that the environmental ion concentration during microbial growth strongly influences the intensity of changes in virulence and gene expression profiles in response to low sedimental shear conditions. For example, higher concentrations of phosphate ions altered the ability of S. typhimurium to respond to spaceflight and minimized its pathogenic-related effects. The term “ions” as used herein is not limited to one particular type of ion, and includes, e.g., phosphate, chloride, sulfate/sulfur, bromide, nitrate-n, o-phosphate, pH/hydrogen ion, calcium, chromium, copper, iron, lithium, fluoride, magnesium, manganese, molybdenum, nickel, potassium, sodium and zinc, among others.

[0042] In one embodiment, one or more ion concentrations are modulated to inhibit pathogenic responses of microorganisms to low sedimental shear environments. Such modulations are useful in human spaceflight to mitigate the adverse effects of microorganisms necessarily present and undergoing the subject pathogenic responses during and because of such flight. Such modulations are also useful to counteract pathogenic responses of microorganisms to low sedimental shear environments encountered during infection of a host, in which case, modulation of ion concentrations can be achieved by oral administration to the host with compositions containing one or more ions, or ion chelators.

[0043] In one embodiment, one or more ion concentrations are modulated to modulate, i.e., to amplify or decrease, the responses of microorganisms to low sedimental shear environments. Such modulations are useful, e.g., to enhance the immunogenicity of a strain for the development of vaccine or other therapeutic products, to enhance the stress resistance of a microorganism for the development of bioindustrial products.

[0044] In a further aspect, the present invention provides microorganisms harvested from a low sedimental shear culture.

[0045] In one embodiment, the present invention provides Salmonella sp. obtained from a culture grown in spaceflight. In a preferred embodiment the microorganism is Salmonella typhimurium. Salmonella sp., particularly wild type (native) Salmonella sp., obtained from a culture grown under low sedimental shear conditions provided by the RWVs is excluded from the scope of the present invention. In another embodiment, the present invention provides Streptococcus pneumonia harvested from a culture grown under low sedimental shear conditions. In still another embodiment, the present invention provides Pseudomonas aeruginosa harvested from a culture grown under low sedimental shear conditions. In yet another embodiment, the present invention provides a fungus, such as Candida albicans and Saccharomyces cerevisiae, harvested from a culture grown under low sedimental shear conditions.

[0046] In another aspect, the present invention provides a therapeutic composition comprised of a microorganism obtained from a low sedimental shear culture. The therapeutic composition can be a vaccine composition with improved efficacy as compared to a vaccine made of the same microorganism grown in a control (normal) sedimental shear culture. In one embodiment, the present invention provides a vaccine composition containing Salmonella sp. obtained from a culture grown under low sedimental shear conditions. In a preferred embodiment the microorganism is Salmonella typhimurium. In another preferred embodiment, the present invention provides a vaccine composition containing a recombinant attenuated Salmonella anti-pneumococcal vaccine strain harvested from a culture grown under low sedimental shear conditions. In another embodiment, the present invention provides a vaccine containing Streptococcus pneumonia harvested from a culture grown under low sedimental shear conditions. In still another embodiment, the present invention provides a vaccine containing Pseudomonas aeruginosa harvested from a culture grown under low sedimental shear conditions. In yet another embodiment, the present invention provides a therapeutic composition containing a fungus, such as Candida albicans and Saccharomyces cerevisiae, harvested from a culture grown under low sedimental shear conditions.

[0047] Other compositions formulated with a microorganism obtained from a low sedimental shear culture, useful for various bioindustrial applications, are also included within the scope of the present invention.

[0048] In a further aspect, the present invention provides a method for identifying a gene of a microorganism which modulates the response of the microorganism to low sedimental shear environments.

[0049] Conventional culture conditions, which are currently available in the marketplace, do not have the capability to grow microorganisms in low sedimental shear environments, and therefore are unable to recapitulate low fluid shear levels found within an infected host. Thus, many of the genes that could be expressed or proteins that could be functional are not documented or investigated. These genes are critical to understanding microbial responses during growth in many unique conditions, such as spaceflight, and in many common conditions encountered during the course of microbial natural lifecycles, such as locations in the host during microbial infection. Low sedimental shear environments are useful to identify classes of genes (including regulatory RNAs) and proteins that have heretofore not been recognized, characterized or understood from microorganisms cultured in standard culture conditions.

[0050] As demonstrated by the present inventors, the space-traveling Salmonella had changed expression of 167 genes, as compared to bacteria that remained on Earth. A conserved global regulator, the Hfq protein, has been identified to be involved in the response to the environment of low sedimental shear stress during spaceflight and spaceflight analogue culture. Bacteria that lack the

[0051] Hfq gene did not respond to the low sedimental shear conditions. These results highlight Hfq as a therapeutic target. In addition, a number of genes have been identified in accordance with the present invention to respond in the same direction in both RWV microarray analysis and spaceflight analysis, including dps, fimA, hfq, ptsH, rplD, and yaiV. Several genes have been identified to be regulated in different directions in the two conditions (i.e. up in RWV, but down in flight or vice versa), including ppiB, sipD and frdC.

[0052] According to the present invention, microbial genes that modulate the response of a microorganism to low sedimental shear environments can be identified by culturing the microorganism in a low sedimental shear environment, and comparing expression (at mRNA or protein level) of candidate genes in the microorganism in the low sedimental shear environment relative to ground control conditions. Those that exhibit differential expression can be identified from candidate genes. The embodiment of identifying modulator genes by culturing a Salmonella species in a low sedimental shear environment provided by the RWV is excluded from this aspect of the invention.

[0053] Gene expression can be determined by a variety of art-recognized techniques, including but not limited to, microarray analysis of mRNA, rRNA, tRNA, or small non-coding RNA, RT-PCR or qRT-PCR, Western blot, and proteomics analysis. By “differential expression” it is meant that the ratio of the levels of expression under two different conditions is at least 1.5, preferably at least 2.0, more preferably at least 3.0, even more preferably 5.0 or more. After microorganisms are harvested from a spaceflight or spaceflight analog (such as the RWV bioreactor described above), cells are processed so as to retain the expression profile from a low sedimental shear culture, prior to a specific target identification assay is being performed. For example, for microarray analysis, cells are fixed immediately in RNA Later™ or other relevant fixative. Total RNA is isolated from cells, labeled with fluorescent dyes (such as Cy3 and Cy 5), and used to hybridize to microarrays with genomic DNA. Two assays are performed, one for LSS (low sedimental shear) and one for CSS (control sedimental shear) cultured cells, respectively. After quantitation, the ratio of expression of LSS to CSS is determined. Genes with ratios of 2 or greater (or 0.5 or less) (either up or down-regulated in LSS, respectively) can be identified, for example. For proteomics, cells are fixed using RNA Later or similar fixative, or fixed by flash freezing and storage at −80 degrees C. Cells are lysed and proteins are precipitated with acetone. After digestion with trypsin, the protein samples are subjected to a proteomic assay of choice: MudPIT, LC/MS-MS, 2-D gels followed by MALDI, for example. Proteins that are present under LSS conditions and not in CSS (or vice-versa) can be identified. For Western blotting, cells are fixed using RNA Later or similar fixative, or by flash freezing and storage at −80 degrees C. Fixed cells are resuspended in a protein sample buffer for SDS-PAGE and run on gel, followed by Western blot analysis using antisera from patients/animals or immunizations against prominent antigens. Prominent proteins bands in LSS samples as compared to CSS samples will correspond to proteins that are recognized by the patient/animal and up-regulated under LSS conditions. Protein bands can be cut out and are subjected to MALDI to identify the molecular nature of the underlying protein(s).

[0054] Functional categories of genes that have been or can be identified as differentially expressed in accordance with the present invention include, without limitation, virulence genes, iron metabolism genes, ion response or utilization genes, cell surface polysaccharide genes, protein secretion genes, flagellar genes, stress genes, genes coding for ribosomal proteins, genes coding for fimbrial proteins, transcriptional regulator genes, genes involved in extracellular matrix/biofilm synthesis, stress response genes, sigma factors, genes encoding RNA binding proteins, genes encoding small noncoding regulatory RNAs (small RNAs), DNA polymerase genes, RNA polymerase genes, plasmid transfer/conjugation genes, chaperone proteins, carbon utilization genes, Metabolic pathway genes, energy metabolism genes, chemotaxis genes, genes encoding heat shock proteins, genes encoding putative proteins, genes encoding recombination proteins, genes encoding transport system proteins, genes encoding membrane proteins, genes encoding cell wall components (including LPS), housekeeping genes, genes encoding structural proteins and enzymes, and plasmid genes.

[0055] In certain instances, the functions of identified genes may have been already documented. In other cases, the functions are unknown, or their unique expression in LSS conditions is unknown. The functions of differentially expressed genes identified from LSS cultures can be further characterized by making a mutant microorganism in which a particular gene of interest is mutated (e.g., completely knocked out), and assessing whether the mutant microorganism exhibits any change in virulence, stress resistance or any other phenotypic characteristics, and therefore determining whether this gene is involved in establishing infection, for example. Alternatively, the expression of a gene of interest, which has been identified from LSS cultures, can be altered by mutating its promoter, or completing replacing its promoter with a heterologous promoter, to increase or decrease its expression in order to determine the role of the gene in establishing infection.

[0056] If a gene differentially expressed in LSS conditions is determined to be involved in establishing infection, such gene makes a good target, because a loss of function in this gene will be expected to decrease the ability of the microorganism to cause infection. This will provide a basis for intelligent design of pharmaceutical compounds for treating and preventing infection by this microorganism.

[0057] Further, proteins identified as uniquely expressed in LSS conditions can be used as antigen for immunizations.

[0058] In still a further aspect of the present invention, LSS cultures are used for screening for new drugs against infection by a microorganism. This is achieved by culturing the microorganism in a LSS environment, contacting the microorganism in the culture with a candidate compound, and determining the inhibitory effect of the compound on the growth of the microorganism as indicative of the therapeutic efficacy of the compound. This method of the present invention has the advantage to be able to select compounds that are effective against the microorganism in an in vivo LSS environment during infection.

[0059] In another aspect, the present invention is directed to the use of a host, including during space flight, to study interactions between the host and a microorganism pathogen or an attenuated vaccine strain when both are simultaneously placed in a low sedimental shear environment. The pathogen can, for this purpose, also have been manipulated in an RWV or similar analog.

[0060] According to this aspect of the invention, hosts include animals, animal analogs, plants, insects, and cell and/or tissue cultures from animals, animal analogs or plants.

[0061] In one embodiment, the invention is directed to the use of animal models, including during space flight, as hosts to study interactions between the host and a microorganism pathogen in a low sedimental shear environment. Animal models include those typically used by the art, and include without limitation, animals of the class Mammalia; preferably rodents such as mice, rats and the like.

[0062] In another embodiment, the present invention is directed to the use of so-called animal model analogs as hosts, including during spaceflight, to examine the host-pathogen interaction. Animal model analogs as hosts include those known in the art, such as without limitation, invertebrates, e.g. from the class Nematoda and the like, for the purpose herein.

[0063] In still another embodiment, the invention contemplates the use of plants as hosts, including during space flight, to examine the effect of space flight on the host-pathogen interaction, e.g., that leads to infection and disease.

[0064] In yet another embodiment, the invention is directed to the use of cell and/or tissue cultures from animals (including mammals), animal analogs (e.g. invertebrates such as nematodes and the like) and/or plants as hosts, including during space flight, to examine the effect of space flight on the host-pathogen interaction.

[0065] This invention is further illustrated by the following examples, which are not to be construed in any way as imposing limitations upon the scope thereof. All the publications mentioned in the present disclosure are incorporated herein by reference.

### Example 1

### Spaceflight Alters Bacterial Gene Expression and Virulence and Reveals Role for Global Regulator Hfq

[0066] This example describes experiments conducted with the bacterial pathogen Salmonella typhimurium which was grown aboard Space Shuttle mission STS-115 and compared to identical ground control cultures. Global microarray and proteomic analyses revealed 167 transcripts and 73 proteins changed expression with the conserved RNA-binding protein Hfq identified as a likely global regulator involved in the response to the spaceflight environment. Hfq involvement was confirmed with a ground based microgravity culture model. Spaceflight samples exhibited enhanced virulence in a murine infection model and extracellular matrix accumulation consistent with a biofilm.

### Materials and Methods

### Strains, Media, and Chemical Reagents

[0067] The virulent, mouse-passaged Salmonella typhimurium derivative of SL1344 termed χ3339 was used as the wild type strain in all flight and ground-based experiments (5). Isogenic derivatives of SL1344 with mutations Δhfq, hfq 3′Cm, and invA Km were used in ground-based experiments (13, 22). The Δhfq strain contains a deletion of the hfq open reading frame (ORF) and replacement with a chloramphenicol resistance cassette, and the hfq 3′Cm strain contains an insertion of the same cassette immediately downstream of the WT hfq ORF. The invA Km strain contains a kanamycin resistance cassette inserted in the invA ORF. Lennox broth (LB) was used as the growth media in all experiments (5) and phosphate buffered saline (PBS) (Invitrogen, Carlsbad, Calif.) was used to resuspend bacteria for use as inoculum in the FPAs. The RNA fixative RNA Later II (Ambion, Austin, Tex.), glutaraldehyde (16%) (Sigma, St. Louis, Mo.), and formaldehyde (2%) (Ted Pella Inc., Redding, Calif.) were used as fixatives in flight experiments.

### Loading of Fluid Processing Apparatus (FPA)

[0068] An FPA consists of a glass barrel that can be divided into compartments via the insertion of rubber stoppers and a lexan sheath into which the glass barrel is inserted. Each compartment in the glass barrel was filled with a solution in an order such that the solutions would be mixed at specific timepoints in flight via two actions: (1) downward plunging action on the rubber stoppers and (2) passage of the fluid in a given compartment through a bevel on the side of the glass barrel such that it was released into the compartment below. Glass barrels and rubber stoppers were coated with a silicone lubricant (Sigmacote, Sigma, St. Louis, Mo.) and autoclaved separately before assembly. A stopper with a gas exchange membrane was inserted just below the bevel in the glass barrel before autoclaving. FPA assembly was performed aseptically in a laminar flow hood in the following order: 2.0 ml LB media on top of the gas exchange stopper, one rubber stopper, 0.5 ml PBS containing bacterial inoculum (approximately 6.7×10⁶ bacteria), another rubber stopper, 2.5 ml of either RNA fixative or LB media, and a final rubber stopper. Syringe needles (gauge 25⅝) were inserted into rubber stoppers during this process to release air pressure and facilitate assembly. To facilitate group activation of FPAs during flight and to ensure proper containment levels, sets of 8 FPAs were loaded into larger containers termed group activation packs (GAPs).

### Murine Infection Assay

[0069] Six to eight week old female Balb/c mice (housed in the Animal Facility at the Space Life Sciences Lab at Kennedy Space Center) were fasted for approximately 6 hours and then per-orally infected with increasing dosages of S. typhimurium harvested from flight and ground FPA cultures and resuspended in buffered saline gelatin (5). Ten mice per infectious dosage were used, and food and water were returned to the animals within 30 minutes post-infection. The infected mice were monitored every 6-12 hours for 30 days. The LD₅₀ value was calculated using the formula of Reed and Muench (23).

### Scanning Electron Microscopy

[0070] A portion of cells from the viable, media-supplemented cultures from flight and ground FPAs were fixed for scanning electron microscopic analysis using 8% glutaraldehyde and 1% formaldehyde and were processed for SEM as described previously (24).

### Microarray Analysis

[0071] Total cellular RNA purification, preparation of fluorescently-labeled, single stranded cDNA probes, probe hybridization to whole genome S. typhimurium microarrays, and image acquisition was performed as previously described (7) using three biological and three technical replicates for each culture condition. Flow cytometric analysis revealed that cell numbers in flight and ground biological replicate cultures were not statistically different (using SYTO-BC dye per manufacturer's recommendations; Invitrogen, Carlsbad, Calif.). Data from stored array images were obtained via QuantArray software (Packard Bioscience, Billerica, Mass.) and statistically analyzed for significant gene expression differences using the Webarray suite as described previously (25). GeneSpring software was also used to validate the genes identified with the Webarray suite. To obtain the genes comprising the spaceflight stimulon as listed in Table 1, the following parameters were used in Webarray: a fold increase or decrease in expression of 2 fold or greater, a spot quality (A-value) of greater than 9.5, and p-value of less than 0.05. For some genes listed in Table 1, the following parameters were used: a fold increase or decrease in expression of value greater than 1.6 or less then 0.6 respectively, an A-value of 8.5 or greater, and p-value of less then 0.1. The vast majority of genes listed in Table 1 had an A-value of greater than 9.0 (with most being greater than 9.5) and a p-value of 0.05 or less. The exceptions were as follows: sbmA (p-value=0.06), oxyS (A-value=8.81), rplY (A-value=8.95), cspD (A-value=8.90), yfiA (p-value=0.08), ompX (p-value=0.09), has (p-value=0.08), rmf (A-value=8.82), wcaD (p-value 0.09), and fliE (A-value=8.98). To identify spaceflight stimulon genes also contained in the Hfq regulon, proteins or genes found to be regulated by Hfq or RNAs found to be bound by Hfq as reported in the indicated references were scanned against the spaceflight microarray data for expression changes within the parameters above (8, 12, 13, 16, 26).

### Multidimensional Protein Identification (MudPIT) Analysis Via Tandem Mass Spectrometry Coupled to Dual Nano-Liquid Chromatography (LC-LC-MS/MS)

[0072] Acetone-protein precipitates from whole cell lysates obtained from flight and ground cultures (representing three biological replicates) were subjected to MudPIT analysis using the LC-LC-MS/MS technique as described previously (27, 28). Tandem MS spectra of peptides were analyzed with TurboSEQUEST™ v 3.1 and XTandem software, and the data were further analyzed and organized using the Scaffold program (29, 30). See Table 2 for the specific parameters used in Scaffold to identify the proteins in this study.

### Ground-Based RWV Cultures and Acid Stress and Macrophage Survival Assays

[0073] S. typhimurium cultures were grown in rotating wall vessels in the LSMMG and 1×g orientations and assayed for resistance to pH=3.5 and survival inside J774 macrophages as described previously (5), except that the RWV cultures were grown for 24 hours at 37 degrees C. For acid stress assays, the percentage of surviving bacteria present after 45-60 minutes acid stress (compared to the original number of bacteria before addition of the stress) was calculated. A ratio of the percent survival values for the LSMMG and 1×g cultures was obtained (indicating the fold difference in survival between these cultures) and is presented as the acid survival ratio in FIG. 5A. The mean and standard deviation from three independent experimental trials is presented. For macrophage survival assays, the number of bacteria present inside J774 macrophages at 2 hours and 24 hours post-infection was determined, and the fold difference between these two numbers was calculated. The mean and standard deviation of values from three independent experimental trials (each done in triplicate tissue culture wells) is presented. The statistical differences observed in the graphs in FIG. 5 were calculated at p-values less than 0.05.

### Results

### Whole-Genome Transcriptional and Proteomic Analysis of Spaceflight and Ground Cultures.

[0074] To determine which genes changed expression in response to spaceflight, total bacterial RNA was isolated from the fixed flight and ground samples, qualitatively analyzed to ensure lack of degradation via denaturing gel electrophoresis, quantitated, and then reversed transcribed into labeled, single-stranded cDNA. The labeled cDNA was co-hybridized with differentially-labeled S. typhimurium genomic DNA to whole genome S. typhimurium microarray slides. The cDNA signal hybridizing to each gene spot was quantitated, and the normalized, background-subtracted data was analyzed for statistically-significant, 2-fold or greater differences in gene expression between the flight and ground samples. 167 genes were found to be differentially-expressed in flight as compared to ground controls from a variety of functional categories (69 up-regulated and 98 down-regulated) (Table 1). The proteomes of fixed cultures were also obtained via multi-dimensional protein identification (MudPIT) analysis. Among 251 proteins expressed in the flight and ground cultures, 73 were present at different levels in these samples (Table 2). Several of the genes encoding these proteins were also identified via microarray analysis. Collectively, these gene expression changes form the first documented bacterial spaceflight stimulon indicating that bacteria respond to this environment with widespread alterations of expression of genes distributed globally throughout the chromosome (FIG. 4, Panel A).

### Involvement of Hfq in Spaceflight and LSMMG Responses

[0075] The data indicated that a pathway involving the conserved RNA-binding regulatory protein Hfq played a role in this response (Table 3). Hfq is an RNA chaperone that binds to small regulatory RNA and mRNA molecules to facilitate mRNA translational regulation in response to envelope stress (in conjunction with the specialized sigma factor RpoE), environmental stress (via alteration of RpoS expression), and changes in metabolite concentrations, such as iron levels (via the Fur pathway) (8-12). Hfq is also involved in promoting the virulence of several pathogens including S. typhimurium (13), and Hfq homologues are highly conserved across species of prokaryotes and eukaryotes (14). The data strongly supported a role for Hfq in the response to spaceflight: (1) The expression of hfq was decreased in flight, and this finding matched previous results in which S. typhimurium hfq gene expression was decreased in a ground-based model of microgravity (7); (2) Expression of 64 genes in the Hfq regulon was altered in flight (32% of the total genes identified), and the directions of differential changes of major classes of these genes matched predictions associated with decreased hfq expression (see subsequent examples); (3) several small regulatory RNAs that interact with Hfq were differentially regulated in flight as would be predicted if small RNA/Hfq pathways are involved in a spaceflight response; (4) The levels of OmpA, OmpC, and OmpD mRNA and protein are classic indicators of the RpoE-mediated periplasmic stress response which involves Hfq (15). Transcripts encoding OmpA, OmpC, and OmpD (and OmpC protein level) were up-regulated in flight, correlating with hfq down-regulation; (5) Hfq promotes expression of a large class of ribosomal structural protein genes (12), and many such genes exhibited decreased expression in flight; (6) Hfq is a negative regulator of the large tra operon encoding the F plasmid transfer apparatus (16), and several tra genes from related operons on two plasmids present in S. typhimurium χ3339 were up regulated in flight; (7) Hfq is intimately involved in a periplasmic stress signaling pathway that is dependent on the activity levels of three key proteins, RpoE, DksA, and RseB: differential expression of these genes was observed in flight (8, 12); (8) Hfq regulates the expression of the Fur protein and other genes involved in the iron response pathway, and several iron utilization/storage genes were found to have altered expression in flight (9, 11). This finding also matched previous results in which iron pathway genes in S. typhimurium changed expression in a ground-based model of microgravity, and the Fur protein was shown to play a role in stress resistance alterations induced in the same model (7).

[0076] Experiments were performed to verify a role for Hfq in the spaceflight response using a cellular growth apparatus that serves as a ground-based model of microgravity conditions termed the rotating wall vessel (RWV) bioreactor (FIG. 2). Designed by NASA, the RWV has been extensively used in this capacity to study the effects of a biomedically relevant low fluid shear growth environment (which closely models the liquid growth environment encountered by cells in the microgravity environment of spaceflight as well as by pathogens during infection of the host) on various types of cells (6, 17-19). Studies with the RWV involve using two separate apparatus: one is operated in the modeled microgravity position (termed low-shear modeled microgravity or LSMMG) and one is operated as a control in a position (termed 1×g) where sedimentation due to gravity is not offset by the rotating action of the vessel. LSMMG-induced alterations in acid stress resistance and macrophage survival of S. typhimurium have previously been shown to be associated with global changes in gene expression and virulence (5, 7).

[0077] Wild type and isogenic hfq mutant strains of S. typhimurium were grown in the RWV in the LSMMG and 1×g positions and assayed for the acid stress response and macrophage survival. While the wild type strain displayed a significant difference in acid resistance between the LSMMG and 1×g cultures, this response was not observed in the hfq mutant, which contains a deletion of the hfq gene and replacement with a Cm-r cassette (FIG. 5, Panel A). Two control strains, hfq 3′Cm (containing an insertion of the Cm-r cassette just downstream of the WT hfq gene) and invA Km (containing a Km-r insertion in a gene unrelated to stress resistance), gave the same result as the WT strain. Intracellular replication of the LSMMG-grown WT (hfq 3′Cm) strain in infected J774 macrophages was also increased as compared to the 1×g control, and this phenotype was not observed in the hfq mutant strain (FIG. 5, Panel B). Collectively, these data indicate that Hfq is involved in the bacterial spaceflight response as confirmed in a ground-based model of microgravity conditions. In addition, the intracellular replication phenotype inside macrophages correlates with the finding that spaceflight and LSMMG cultures exhibit increased virulence in mice (see text below).

Increased Virulence of S. typhimurium Grown in Spaceflight as Compared to Ground Controls.

[0078] Since growth during spaceflight and potential global reprogramming of gene expression in response to this environment could alter the virulence of a pathogen, we compared the virulence of S. typhimurium spaceflight samples to identical ground controls as a second major part of our study. Bacteria from flight and ground cultures were harvested and immediately used to inoculate female Balb/c mice via a per-oral route of infection on the same day as Shuttle landing. Two sets of mice were infected at increasing dosages of either flight or ground cultures, and the health of the mice was monitored every 6-12 hours for 30 days. Mice infected with bacteria from the flight cultures displayed a decreased time to death (at the 10⁷ dosage), increased percent mortality at each infection dosage and a decreased LD₅₀ value compared to those infected with ground controls (FIG. 4, Panels B,C,D). These data indicate increased virulence for spaceflight S. typhimurium samples and are consistent with previous studies in which the same strain of S. typhimurium grown in the RWV under LSMMG conditions displayed enhanced virulence in a murine model as compared to 1×g controls (5).

### Scanning Electron Microscopy of Spaceflight and Ground Cultures.

[0079] To determine any morphological differences between flight and ground cultures, scanning electron microscopic (SEM) analysis of bacteria from these samples was performed. While no difference in the size and shape of individual cells in both cultures was apparent, the flight samples demonstrated clear differences in cellular aggregation and clumping that was associated with the formation of an extracellular matrix (FIG. 4, Panel E). Consistent with this finding, several genes associated with surface alterations related to biofilm formation changed expression in flight (up-regulation of wca/wza colonic acid synthesis operon, ompA, fimII; down-regulation of motility genes) (Table 3). SEM images of other bacterial biofilms show a similar matrix accumulation (20, 21). Since extracellular matrix/biofilm formation can help to increase survival of bacteria under various conditions, this phenotype indicates a change in bacterial community potentially related to the increased virulence of the flight bacteria in the murine model.

TABLE 1
Salmonella typhimurium genes differentially-regulated during spaceflight mission STS-115

| | | | |
|---|---|---|---|
| Gene | Fold | Gene | |
| number | change | name | Known or putative function |

UP-regulated

| | | | |
|---|---|---|---|
| Secreted proteins: | | | |
| STM1959 (SEQ ID NO: 1) | 2.10 | fliC | flagellar biosynthesis; flagellin, filament |
| | | | structural |
| | | | protein |
| STM2066 (SEQ ID NO: 2) | 2.31 | sopA | Secreted effector protein of Salmonella dublin |
| STM2883 (SEQ ID NO: 3) | 2.57 | sipD | cell invasion protein |
| STM2884 (SEQ ID NO: 4) | 6.28 | sipC | cell invasion protein |
| Membrane proteins: | | | |
| STM0374 (SEQ ID NO: 5) | 2.04 | yaiV | putative inner membrane protein |
| STM1070 (SEQ ID NO: 6) | 2.05 | ompA | putative hydrogenase, membrane component |
| STM1572 (SEQ ID NO: 7) | 3.34 | ompD | outer membrane protein; bacterial porin |
| STM2267 (SEQ ID NO: 8) | 2.44 | ompC | outer membrane protein 1b (ib; c), porin |
| STM3420 (SEQ ID NO: 9) | 3.12 | secY | preprotein translocase of IISP family, putative |
| | | | membrane ATPase |
| Other function: | | | |
| STM0152 (SEQ ID NO: 10) | 2.18 | aceE | pyruvate dehydrogenase, decarboxylase |
| | | | component |
| STM0182 (SEQ ID NO: 11) | 2.21 | panB | 3-methyl-2-oxobutanoate |
| | | | hydroxymethyltransferase |
| STM0240 (SEQ ID NO: 12) | 2.02 | yaeJ | putative-tRNA hydrolase domain |
| STM0272 (SEQ ID NO: 13) | 2.36 | | putative ATPase with chaperone activity; |
| | | | homologue of Yersinia clpB |
| STM0596 (SEQ ID NO: 14) | 2.24 | entE | 2,3-dihydroxybenzoate-AMP ligase |
| STM0730 (SEQ ID NO: 15) | 4.75 | gltA | citrate synthase |
| STM1040 (SEQ ID NO: 16) | 2.12 | | Gifsy-2 prophage; probable minor tail protein |
| STM1290 (SEQ ID NO: 17) | 7.67 | gapA | glyceraldehyde-3-phosphate dehydrogenase A |
| STM1749 (SEQ ID NO: 18) | 4.76 | adhE | iron-dependent alcohol dehydrogenase of AdhE |
| STM2106 (SEQ ID NO: 19) | 2.07 | wcaI | putative glycosyl transferase in colanic acid |
| | | | biosynthesis |
| STM2118 (SEQ ID NO: 20) | 2.30 | wza | putative polysaccharide export protein, outer |
| | | | membrane |
| STM2181 (SEQ ID NO: 21) | 2.06 | yohJ | putative effector of murein hydrolase LrgA |
| STM2282 (SEQ ID NO: 22) | 2.58 | glpQ | glycerophosphodiester phosphodiesterase, |
| | | | periplasmic |
| STM2314 (SEQ ID NO: 23) | 2.58 | | putative chemotaxis signal transduction protein |
| STM2708 (SEQ ID NO: 24) | 2.03 | | Fels-2 prophage: similar to tail fiber protein |
| | | | (gpI) in |
| | | | phage P2 |
| STM2719 (SEQ ID NO: 25) | 2.12 | | Fels-2 prophage: similar to gpR in phage 186 |
| STM2843 (SEQ ID NO: 26) | 2.03 | hydN | electron transport protein (FeS senter) from |
| | | | formate to |
| | | | hydrogen |
| STM2846 (SEQ ID NO: 27) | 2.26 | hycH | processing of HycE (part of the FHL complex) |
| STM2855 (SEQ ID NO: 28) | 3.25 | hypB | hydrogenase-3 accessory protein, assembly of |
| | | | metallocenter |
| STM4311 (SEQ ID NO: 29) | 3.58 | tnpA | IS200 transposase |
| STM4325 (SEQ ID NO: 30) | 6.39 | dcuA | Dcu family, anaerobic dicarboxylate transport |
| | | | protein |
| STM4415 (SEQ ID NO: 31) | 2.71 | fbp | fructose-bisphosphatase |
| STM4466 (SEQ ID NO: 32) | 4.07 | | putative carbamate kinase |
| SSL_2286 (SEQ ID NO: 33) | 2.97 | orf36 | putative phage replicase |
| Putative, unknown function: | | | |
| STM0289 (SEQ ID NO: 34) | 2.08 | | putative cytoplasmic protein |
| STM0699 (SEQ ID NO: 35) | 2.76 | | putative cytoplasmic protein |
| STM2744 (SEQ ID NO: 36) | 2.44 | | putative cytoplasmic protein |
| STM3752 (SEQ ID NO: 37) | 2.05 | | putative cytoplasmic protein |
| SSL_T1747 (SEQ ID NO: 38) | 4.06 | | putative cytoplasmic protein |
| Plasmid genes: | | | |
| Plasmid 1 (pSLT): | | | |
| PSLT011 (SEQ ID NO: 39) | 2.20 | srgA | sdiA-regulated gene; putative thiol-disulfide |
| | | | isomerase or thioredoxin |
| PSLT015 (SEQ ID NO: 40) | 4.44 | orf5 | putative outer membrane protein |
| PSLT039 (SEQ ID NO: 41) | 2.21 | spvB | Salmonella plasmid virulence: hydrophilic |
| | | | protein |
| PSLT043 (SEQ ID NO: 42) | 4.21 | | putative phosphoribulokinase/uridine kinase |
| | | | family |
| PSLT044 (SEQ ID NO: 43) | 4.43 | | putative integrase protein |
| PSLT054 (SEQ ID NO: 44) | 2.37 | samB | mutagenesis by UV and mutagens; related to |
| | | | umuDC operon |
| PSLT068 (SEQ ID NO: 45) | 2.04 | | putative ParB-like nuclease domain |
| PSLT072 (SEQ ID NO: 46) | 2.11 | | putative transglycosylase |
| PSLT081 (SEQ ID NO: 47) | 4.71 | traB | conjugative transfer: assembly |
| PSLT095 (SEQ ID NO: 48) | 4.24 | traN | conjugative transfer: aggregate stability |
| PSLT099 (SEQ ID NO: 49) | 2.32 | trbB | conjugative transfer |
| PSLT100 (SEQ ID NO: 50) | 2.59 | traH | conjugative transfer: assembly |
| PSLT101 (SEQ ID NO: 51) | 2.20 | traG | conjugative transfer: assembly abd aggregate |
| | | | stability |
| PSLT104 (SEQ ID NO: 52) | 2.87 | traD | conjugative transfer: DNA transport |
| PSLT110 (SEQ ID NO: 53) | 2.37 | traX | conjugative transfer: fimbrial acetylation |
| Plasmid 2: | | | |
| SSL_36 (SEQ ID NO: 54) | 2.02 | colIb | colicin Ib protein |
| SSL_T3 (SEQ ID NO: 55) | 2.68 | trbC | conjugative transfer |
| SSL_T5 (SEQ ID NO: 56) | 3.14 | trbA | conjugative transfer |
| SSL_T12 (SEQ ID NO: 57) | 2.34 | traT | conjugative transfer |
| SSL_T20 (SEQ ID NO: 58) | 2.91 | traK | conjugative transfer |
| SSL_T24 (SEQ ID NO: 59) | 2.10 | traF | conjugative transfer |
| SSL_T35 (SEQ ID NO: 60) | 3.03 | pilL | lipoprotein |
| SSL_T45 (SEQ ID NO: 61) | 2.32 | yagA | unknown function |
| SSL_T52 (SEQ ID NO: 62) | 2.17 | stbA | plasmid stability |
| SSL_T53 (SEQ ID NO: 63) | 5.31 | orf05 | unknown function |
| SSL_T66 (SEQ ID NO: 64) | 2.93 | ygbA | unknown function |
| Plasmid 3: | | | |
| SSL_T69 (SEQ ID NO: 65) | 2.39 | tnpB | putative transposase |
| SSL_T70 (SEQ ID NO: 66) | 14.1 | strB | streptomycin resistance |
| SSL_T71 (SEQ ID NO: 67) | 3.55 | strA | streptomycin resistance |
| SSL_T72 (SEQ ID NO: 68) | 7.43 | sulII | sulphonamide resistance |
| SSL_5085 (SEQ ID NO: 69) | 2.08 | repA | plasmid replication |

DOWN-regulated

| | | | |
|---|---|---|---|
| Protein secretion: | | | |
| STM1153 (SEQ ID NO: 70) | 0.342 | msyB | suppresses protein export mutants |
| STM2895 (SEQ ID NO: 71) | 0.417 | invB | surface presentation of antigens; secretory |
| | | | proteins |
| STM3293 (SEQ ID NO: 72) | 0.432 | secG | preprotein translocase IISP family |
| STM3701 (SEQ ID NO: 73) | 0.473 | secB | molecular chaperone in protein export |
| STM3974 (SEQ ID NO: 74) | 0.445 | tatB | component of Sec-independent protein secretion |
| | | | pathway |
| STM4147 (SEQ ID NO: 75) | 0.392 | secE | preprotein translocase IISP family, membrane |
| | | | subunit |
| Flagella: | | | |
| STM1916 (SEQ ID NO: 76) | 0.458 | cheY | chemotaxis regulator, transmits signals to |
| | | | flagelllar |
| | | | motor |
| STM1925 (SEQ ID NO: 77) | 0.356 | flhD | regulator of flagellar biosynthesis, acts on class 2 |
| | | | operons |
| STM1962 (SEQ ID NO: 78) | 0.443 | fliT | flagellar biosynthesis; possible export chaperone |
| | | | for |
| | | | FliD |
| Fimbrial: | | | |
| STM0543 (SEQ ID NO: 79) | 0.434 | fimA | major type 1 subunit fimbrin (pilin) |
| Stress proteins: | | | |
| STM0831 (SEQ ID NO: 80) | 0.273 | dps | stress response DNA-binding protein |
| STM1652 (SEQ ID NO: 81) | 0.200 | ynaF | putative universal stress protein |
| Regulatory: | | | |
| STM_sRNA (SEQ ID NO: 82) | 0.458 | RFN | putative small regulatory RNA |
| STM_sRNA (SEQ ID NO: 83) | 0.499 | rne5 | putative small regulatory RNA |
| STM_sRNA (SEQ ID NO: 84) | 0.318 | csrB | regulatory RNA |
| STM0473 (SEQ ID NO: 85) | 0.389 | hha | hemolysin expression modulating protein |
| STM0606 (SEQ ID NO: 86) | 0.493 | ybdO | putative transcriptional regulator, LysR family |
| STM0959 (SEQ ID NO: 87) | 0.415 | lrp | regulator for lrp regulon (AsnC family) |
| STM1444 (SEQ ID NO: 88) | 0.391 | slyA | transcriptional regulator for hemolysin (MarR |
| | | | family) |
| STM1660 (SEQ ID NO: 89) | 0.494 | fnr | transcriptional regulator |
| STM2640 (SEQ ID NO: 90) | 0.402 | rpoE | sigma E (sigma 24) factor of RNA polymerase |
| STM3466 (SEQ ID NO: 91) | 0.438 | crp | catabolite activator protein (CAP), cyclic AMP |
| | | | protein (CRP family) |
| STM4315 (SEQ ID NO: 92) | 0.445 | rtsA | AraC-type DNA-binding domain-containing |
| | | | protein |
| STM4361(SEQ ID NO: 93) | 0.298 | hfq | host factor I for bacteriophage Q beta replication |
| Ribosomal: | | | |
| STM0216 (SEQ ID NO: 94) | 0.344 | rpsB | 30S ribosomal subunit protein S2 |
| STM0469 (SEQ ID NO: 95) | 0.474 | rpmE2 | putative 50S ribosomal protein L31 (second |
| | | | copy) |
| STM2675 (SEQ ID NO: 96) | 0.356 | rimM | 16S rRNA processing protein |
| STM3345 (SEQ ID NO: 97) | 0.310 | rplM | 50S ribosomal subunit protein L13 |
| STM3425 (SEQ ID NO: 98) | 0.403 | rplF | 50S ribosomal subunit protein L6 |
| STM3428 (SEQ ID NO: 99) | 0.438 | rplE | 50S ribosomal subunit protein L5 |
| STM3430 (SEQ ID NO: 100) | 0.182 | rplN | 50S ribosomal subunit protein L14 |
| STM3433 (SEQ ID NO: 101) | 0.422 | rplP | 50S ribosomal subunit protein L16 |
| STM3436 (SEQ ID NO: 102) | 0.289 | rpsS | 30S ribosomal subunit protein S19 |
| STM3438 (SEQ ID NO: 103) | 0.457 | rplW | 50S ribosomal subunit protein L23 |
| STM3439 (SEQ ID NO: 104) | 0.393 | rplD | 50S ribosomal subunit protein L4, regulates S10 |
| | | | expression |
| STM3448 (SEQ ID NO: 105) | 0.250 | rpsL | 30S ribosomal subunit protein S12 |
| STM4150 (SEQ ID NO: 106) | 0.423 | rplA | 50S ribosomal subunit protein L1, regulates L1 |
| | | | and |
| | | | L11 |
| STM4391 (SEQ ID NO: 107) | 0.401 | rpsF | 30S ribosomal subunit protein S6 |
| Membrane/periplasmic proteins: | | | |
| STM1164 (SEQ ID NO: 108) | 0.340 | yceB | putative outer membrane lipoprotein |
| STM1249 (SEQ ID NO: 109) | 0.443 | | putative periplasmic protein |
| STM1432 (SEQ ID NO: 110) | 0.464 | ydhO | putative cell wall-associated hydrolase |
| STM1460 (SEQ ID NO: 111) | 0.408 | ydgK | putative inner membrane protein |
| STM1732 (SEQ ID NO: 112) | 0.276 | ompW | outer membrane protein W; colicin S4 receptor |
| STM1798 (SEQ ID NO: 113) | 0.471 | ycgR | putative inner membrane protein |
| STM2505 (SEQ ID NO: 114) | 0.410 | | putative inner membrane protein |
| STM2685 (SEQ ID NO: 115) | 0.411 | smpA | small membrane protein A |
| STM2802 (SEQ ID NO: 116) | 0.453 | ygaM | putative inner membrane protein |
| STM2870 (SEQ ID NO: 117) | 0.462 | | putative inner membrane protein |
| STM3107 (SEQ ID NO: 118) | 0.460 | yggN | putative periplasmic protein |
| STM3228 (SEQ ID NO: 119) | 0.378 | yqjC | putative periplasmic protein |
| STM3229 (SEQ ID NO: 120) | 0.485 | yqjD | putative inner membrane protein |
| STM3231 (SEQ ID NO: 121) | 0.457 | yqjK | putative inner membrane protein |
| STM3347 (SEQ ID NO: 122) | 0.393 | yhcB | putative periplasmic protein |
| STM4378 (SEQ ID NO: 123) | 0.328 | yjfN | putative inner membrane protein |
| STM4561 (SEQ ID NO: 124) | 0.319 | osmY | hyperosmotically inducible periplasmic protein |
| Other function: | | | |
| STM0186 (SEQ ID NO: 125) | 0.406 | dksA | dnaK suppressor protein |
| STM0368 (SEQ ID NO: 126) | 0.386 | prpB | putative carboxyphosphonoenolpyruvate mutase |
| STM0369 (SEQ ID NO: 127) | 0.403 | prpC | putative citrate synthase |
| STM0417 (SEQ ID NO: 128) | 0.382 | ribH | riboflavin synthase, beta chain |
| STM0536 (SEQ ID NO: 129) | 0.483 | ppiB | peptidyl-prolyl cis-trans isomerase B (rotamase |
| | | | B) |
| STM0665 (SEQ ID NO: 130) | 0.480 | gltI | ABC superfamily (bind_prot), |
| | | | glutamate/aspartate |
| | | | transporter |
| STM0759 (SEQ ID NO: 131) | 0.492 | ybgS | putative homeobox protein |
| STM0803 (SEQ ID NO: 132) | 0.408 | moaB | molybdopterin biosynthesis, protein B |
| STM0966 (SEQ ID NO: 133) | 0.497 | dmsC | anaerobic dimethyl sulfoxide reductase, subunit C |
| STM1196 (SEQ ID NO: 134) | 0.336 | acpP | acyl carrier protein |
| STM1291 (SEQ ID NO: 135) | 0.474 | yeaA | putative peptide methionine sulfoxide reductase |
| STM1569 (SEQ ID NO: 136) | 0.458 | fdnH | formate dehydrogenase-N, Fe—S beta subunit, |
| | | | nitrate- |
| | | | inducible |
| STM1783 (SEQ ID NO: 137) | 0.478 | pth | peptidyl-tRNA hydrolase |
| STM2488 (SEQ ID NO: 138) | 0.436 | nlpB | lipoprotein-34 |
| STM2542 (SEQ ID NO: 139) | 0.495 | nifU | NifU homologs involved in Fe—S cluster |
| | | | formation |
| STM2549 (SEQ ID NO: 140) | 0.460 | asrB | anaerobic sulfide reductase |
| STM2646 (SEQ ID NO: 141) | 0.294 | yfiD | putative formate acetyltransferase |
| STM2746 (SEQ ID NO: 142) | 0.344 | | putative Excinuclease ATPase subunit |
| STM2767 (SEQ ID NO: 143) | 0.491 | | putative Superfamily I DNA and RNA helicase |
| STM3039 (SEQ ID NO: 144) | 0.455 | idi | isopentenyldiphosphate isomerase |
| STM3054 (SEQ ID NO: 145) | 0.431 | gcvH | glycine cleavage complex protein H |
| STM3241 (SEQ ID NO: 146) | 0.458 | tdcE | pyruvate formate-lyase 4/2-ketobutyrate |
| | | | formate- |
| | | | lyase |
| STM3443 (SEQ ID NO: 147) | 0.404 | bfr | bacterioferrin, an iron storage homoprotein |
| STM3702 (SEQ ID NO: 148) | 0.453 | grxC | glutaredoxin 3 |
| STM3703 (SEQ ID NO: 149) | 0.321 | yibN | putative Rhodanese-related sulfurtransferases |
| STM3870 (SEQ ID NO: 150) | 0.484 | atpE | membrane-bound ATP synthase, F0 sector, |
| | | | subunit c |
| STM3915 (SEQ ID NO: 151) | 0.492 | trxA | thioredoxin 1, redox factor |
| STM4341 (SEQ ID NO: 152) | 0.411 | frdC | fumarate reductase, anaerobic, membrane anchor |
| | | | polypeptide |
| STM4414 (SEQ ID NO: 153) | 0.475 | ppa | inorganic pyrophosphatase |
| Putative ORF, unknown function: | | | |
| STM0474 (SEQ ID NO: 154) | 0.435 | ybaJ | putative cytoplasmic protein |
| STM1367 (SEQ ID NO: 155) | 0.378 | ydiH | putative cytoplasmic protein |
| STM1583 (SEQ ID NO: 156) | 0.441 | | putative cytoplasmic protein |
| STM2390 (SEQ ID NO: 157) | 0.290 | yfcZ | putative cytoplasmic protein |
| STM2801 (SEQ ID NO: 158) | 0.451 | ygaC | putative cytoplasmic protein |
| STM3461 (SEQ ID NO: 159) | 0.493 | | putative cytoplasmic protein |
| STM3654 (SEQ ID NO: 160) | 0.341 | | pseudogene; in-frame stop following codon 23 |
| STM3995 (SEQ ID NO: 161) | 0.459 | yihD | putative cytoplasmic protein |
| STM4002 (SEQ ID NO: 162) | 0.172 | | putative cytoplasmic protein |
| STM4088 (SEQ ID NO: 163) | 0.357 | yiiU | putative cytoplasmic protein |
| STM4239 (SEQ ID NO: 164) | 0.334 | | putative cytoplasmic protein |
| STM4240 (SEQ ID NO: 165) | 0.411 | yjbJ | putative cytoplasmic protein |
| STM4250 (SEQ ID NO: 166) | 0.422 | yjbQ | putative cytoplasmic protein |
| STM4499 (SEQ ID NO: 167) | 0.494 | yeeN | putative cytoplasmic protein |

TABLE 2
Salmonella typhimurium proteins identified in flight and ground total cell
samples from STS-115 using MudPIT analysis (251 proteins total)

| | | Protein | Ground | Flight |
|---|---|---|---|---|
| | | molecular | total cell | total cell |
| | Accession | weight | protein ID | protein ID |
| Protein name | number | (Daltons) | probability* | probability* |
| aspartate ammonia-lyase | gi\|16767575 (SEQ ID NO: 168) | 52268.1 | 100% | 100% |
| translation elongation factor EF-Tu.A | gi\|96718 (SEQ ID NO: 169) | 43233.6 | 100% | 100% |
| elongation factor G | gi\|16766735 (SEQ ID NO: 170) | 77582 | 100% | 100% |
| putative hydrogenase membrane component precursor | gi\|16764429 (SEQ ID NO: 171) | 37497.2 | 100% | 100% |
| GroEL protein | gi\|16767579 (SEQ ID NO: 172) | 57267.8 | 100% | 100% |
| 30S ribosomal protein S1 | gi\|16764341(SEQ ID NO: 173) | 61154.4 | 100% | 100% |
| L-asparaginase | gi\|16766407 (SEQ ID NO: 174) | 36908.5 | 100% | 100% |
| phosphoenolpyruvate carboxykinase | gi\|16766788 (SEQ ID NO: 175) | 59559.8 | 100% | 100% |
| enolase | gi\|16766258 (SEQ ID NO: 176) | 45468 | 100% | 100% |
| glyceraldehyde 3-phosphate dehydrogenase A | gi\|16764641 (SEQ ID NO: 177) | 35568.6 | 100% | 100% |
| periplasmic glycerophosphodiester phosphodiesterase | gi\|16765609 (SEQ ID NO: 178) | 40407.8 | 100% | 100% |
| molecular chaperone DnaK | gi\|16763402 (SEQ ID NO: 179) | 69241.2 | 100% | 100% |
| 30S ribosomal protein S3 | gi\|16766723 (SEQ ID NO: 180) | 25965.5 | 100% | 100% |
| formate acetyltransferase 1 | gi\|16764333 (SEQ ID NO: 181) | 84989.4 | 100% | 100% |
| 50S ribosomal subunit protein L7/L12 | gi\|16767406 (SEQ ID NO: 182) | 12281 | 100% | 100% |
| ribosomal protein S7 | gi\|16766736 (SEQ ID NO: 183) | 17572.5 | 100% | 100% |
| histone like DNA-binding protein HU-alpha (NS2) (HU-2) | gi\|16767424 (SEQ ID NO: 184) | 9503.1 | 100% | 100% |
| glycerol kinase | gi\|16767352 (SEQ ID NO: 185) | 56046.2 | 100% | 100% |
| dihydrolipoamide dehydrogenase | gi\|16763544 (SEQ ID NO: 186) | 50621.8 | 100% | 100% |
| sn-glycerol-3-phosphate dehydrogenase | gi\|16766813 (SEQ ID NO: 187) | 56908.5 | 100% | 100% |
| trigger factor | gi\|16763828 (SEQ ID NO: 188) | 48048.1 | 100% | 100% |
| cold shock protein | gi\|16765178 (SEQ ID NO: 189) | 7384.3 | 100% | 100% |
| DNA-binding protein HLP-II | gi\|16765095 (SEQ ID NO: 190) | 15525 | 100% | 100% |
| ATP synthase beta subunit | gi\|16767149 (SEQ ID NO: 191) | 50265.5 | 100% | 100% |
| phosphoglycerate kinase | gi\|16766370 (SEQ ID NO: 192) | 41115.1 | 100% | 100% |
| iron-dependent alcohol dehydrogenase AdhE | gi\|16765093 (SEQ ID NO: 193) | 96199.8 | 100% | 100% |
| 50S ribosomal subunit protein L1 | gi\|16767404 (SEQ ID NO: 194) | 24710.5 | 100% | 100% |
| 30S ribosomal protein S4 | gi\|16766705 (SEQ ID NO: 195) | 23467.7 | 100% | 100% |
| 50S ribosomal subunit protein L13 | gi\|16766640 (SEQ ID NO: 196) | 16000.7 | 100% | 100% |
| putative outer membrane porin precursor | gi\|16764916 (SEQ ID NO: 197) | 39662.7 | 99% | 99% |
| FKBP-type peptidyl-prolyl cis-trans isomerase | gi\|16766742 (SEQ ID NO: 198) | 28928.6 | 100% | 100% |
| transketolase 1 isozyme | gi\|16766377 (SEQ ID NO: 199) | 72117 | 100% | 100% |
| 50S ribosomal subunit protein L5 | gi\|16766717 (SEQ ID NO: 200) | 20300.6 | 100% | 100% |
| DNA-directed RNA polymerase beta′ subunit | gi\|16767408 (SEQ ID NO: 201) | 155220 | 100% | 100% |
| 30S ribosomal protein S13 | gi\|16766707 (SEQ ID NO: 202) | 13144.1 | 100% | 100% |
| alkyl hydroperoxide reductase C22 subunit | gi\|16763985 (SEQ ID NO: 203) | 20729.7 | 100% | 100% |
| 30S ribosomal subunit protein S5 | gi\|16766712 (SEQ ID NO: 204) | 17585 | 100% | 100% |
| 50S ribosomal protein L24 | gi\|16766718 (SEQ ID NO: 205) | 11298.3 | 100% | 100% |
| DNA protection during starvation protein | gi\|16764193 (SEQ ID NO: 206) | 18699.8 | 100% | 100% |
| ribosomal protein L19 | gi\|16765988 (SEQ ID NO: 207) | 13112 | 100% | 100% |
| acyl carrier protein | gi\|16764551 (SEQ ID NO: 208) | 8621.4 | 100% | 100% |
| isocitrate dehydrogenase | gi\|16764593 (SEQ ID NO: 209) | 45771 | 100% | 93% |
| triosephosphate isomerase | gi\|16767347 (SEQ ID NO: 210) | 26899 | 100% | 100% |
| 50S ribosomal subunit protein L3 | gi\|16766729 (SEQ ID NO: 211) | 22228.7 | 100% | 100% |
| 30S ribosomal protein S2 | gi\|16763606 (SEQ ID NO: 212) | 26741.2 | 100% | 100% |
| lysine decarboxylase | gi\|16765879 (SEQ ID NO: 213) | 81220.5 | 100% | 100% |
| putative universal stress protein | gi\|16763991 (SEQ ID NO: 214) | 15882.8 | 100% | 100% |
| putative thiol-alkyl hydroperoxide reductase | gi\|16763782 (SEQ ID NO: 215) | 22299 | 100% | 100% |
| 50S ribosomal protein L9 | gi\|16767640 (SEQ ID NO: 216) | 15765.8 | 100% | 100% |
| 50S ribosomal subunit protein L10 | gi\|16767405 (SEQ ID NO: 217) | 17782.8 | 100% | 100% |
| 30S ribosomal subunit protein S16 | gi\|16765991 (SEQ ID NO: 218) | 9216.7 | 100% | 100% |
| 50S ribosomal protein L20 | gi\|16764687 (SEQ ID NO: 219) | 13479.6 | 100% | 100% |
| pyruvate kinase | gi\|16764728 (SEQ ID NO: 220) | 50639.5 | 100% | 98% |
| 6-phosphogluconate dehydrogenase | gi\|16765411 (SEQ ID NO: 221) | 51379.2 | 100% | 93% |
| inorganic pyrophosphatase | gi\|16767660 (SEQ ID NO: 222) | 19658.8 | 100% | 100% |
| 50S ribosomal protein L4 | gi\|16766728 (SEQ ID NO: 223) | 22068.6 | 100% | 100% |
| 50S ribosomal protein L11 | gi\|16767403 (SEQ ID NO: 224) | 14857.5 | 100% | 100% |
| 50S ribosomal subunit protein L17 | gi\|16766703 (SEQ ID NO: 225) | 14377.2 | 100% | 100% |
| succinyl-CoA synthetase beta chain | gi\|16764108 (SEQ ID NO: 226) | 41462.8 | 100% | 100% |
| 50S ribosomal subunit protein L6 | gi\|16766714 (SEQ ID NO: 227) | 18841.3 | 100% | 100% |
| fructose 1,6-bisphosphate aldolase | gi\|16766369 (SEQ ID NO: 228) | 39138.4 | 100% | 100% |
| aconitate hydratase 2 | gi\|16763548 (SEQ ID NO: 229) | 93513.7 | 100% | 100% |
| iron superoxide dismutase | gi\|16764779 (SEQ ID NO: 230) | 21290.4 | 100% | 100% |
| 50S ribosomal protein L22 | gi\|16766724 (SEQ ID NO: 231) | 12208.6 | 100% | 100% |
| sn-glycerol-3-phosphate dehydrogenase large subunit | gi\|16765611 (SEQ ID NO: 232) | 59039.6 | 100% | 100% |
| RNA polymerase, alpha subunit | gi\|16766704 (SEQ ID NO: 233) | 36494.1 | 100% | 100% |
| 30S ribosomal protein S10 | gi\|16766730 (SEQ ID NO: 234) | 11748.8 | 100% | 100% |
| RNA polymerase, beta subunit | gi\|16767407 (SEQ ID NO: 235) | 150586.6 | 100% | 99% |
| polynucleotide phosphorylase | gi\|16766580 (SEQ ID NO: 236) | 77020.9 | 100% | 100% |
| Lpp1 murein lipoprotein | gi\|16764727 (SEQ ID NO: 237) | 8373.6 | 100% | 93% |
| malate dehydrogenase | gi\|16766654 (SEQ ID NO: 238) | 32457.8 | 100% | 100% |
| citrate synthase | gi\|16764100 (SEQ ID NO: 239) | 48089.9 | 100% | 100% |
| GroES protein | gi\|16767578 (SEQ ID NO: 240) | 10300.1 | 100% | 100% |
| putative glutamic dehyrogenase-like protein | gi\|16765136 (SEQ ID NO: 241) | 48020.6 | 100% | 100% |
| succinyl-CoA synthetase alpha subunit | gi\|16764109 (SEQ ID NO: 242) | 29757.8 | 99% | 100% |
| transaldolase B | gi\|16763397 (SEQ ID NO: 243) | 35154.5 | 100% | 100% |
| glycine dehydrogenase | gi\|16766354 (SEQ ID NO: 244) | 104270.1 | 93% | 100% |
| transcription elongation factor NusA | gi\|16766585 (SEQ ID NO: 245) | 55408.3 | 100% | 100% |
| flagellar biosynthesis filament structural protein | gi\|16766083 (SEQ ID NO: 246) | 52518.5 | 100% | 100% |
| elongation factor Ts | gi\|16763607 (SEQ ID NO: 247) | 30339.6 | 100% | 100% |
| N-acetylneuraminate lyase | gi\|16766634 (SEQ ID NO: 248) | 32437.7 | 100% | 100% |
| 50S ribosomal subunit protein L32 | gi\|16764546 (SEQ ID NO: 249) | 6428.4 | 100% | 100% |
| ATP synthase alpha subunit | gi\|16767151 (SEQ ID NO: 250) | 55096 | 100% | 97% |
| 50S ribosomal subunit protein L14 | gi\|16766719 (SEQ ID NO: 251) | 13550.2 | 99% | 100% |
| phosphate acetyltransferase | gi\|16765792 (SEQ ID NO: 252) | 82305.8 | 100% | 100% |
| 50S ribosomal subunit protein L15 | gi\|16766710 (SEQ ID NO: 253) | 14948.9 | 100% | 100% |
| ribose-phosphate pyrophosphokinase | gi\|16765121 (SEQ ID NO: 254) | 34198.6 | 100% | 88% |
| thioredoxin | gi\|16767191** (SEQ ID NO: 255) | 11789.4 | 100% | 0 |
| arginine-binding periplasmic protein 1 precursor | gi\|16764251 (SEQ ID NO: 256) | 26979.4 | 0 | 93% |
| hydrogenase-2 large subunit | gi\|16766447 (SEQ ID NO: 257) | 62420.6 | 100% | 100% |
| cytoplasmic ferritin | gi\|16765276 (SEQ ID NO: 258) | 19262.5 | 100% | 100% |
| riboflavin synthase subunit beta | gi\|16763797 (SEQ ID NO: 259) | 15990.5 | 100% | 97% |
| 50S ribosomal subunit protein L29 | gi\|16766721 (SEQ ID NO: 260) | 7242.6 | 100% | 93% |
| putative universal stress protein | gi\|16764996 (SEQ ID NO: 261) | 15696.7 | 93% | 100% |
| periplasmic nitrate reductase | gi\|16765587 (SEQ ID NO: 262) | 92856.9 | 100% | 93% |
| hyperosmotically-inducible periplasmic protein | gi\|16767802 (SEQ ID NO: 263) | 21430.3 | 93% | 93% |
| ornithine carbamoyltransferase | gi\|16767710 (SEQ ID NO: 264) | 36798.4 | 100% | 100% |
| 30S ribosomal protein S11 | gi\|16766706 (SEQ ID NO: 265) | 13812.8 | 100% | 100% |
| formate dehydrogenase alpha subunit | gi\|16767302 (SEQ ID NO: 266) | 112357.4 | 100% | 100% |
| nucleoside diphosphate kinase (ndk) | gi\|16765846 (SEQ ID NO: 267) | 15503.7 | 100% | 100% |
| putative pyruvate-flavodoxin oxidoreductase | gi\|16764995 (SEQ ID NO: 268) | 128563.7 | 55% | 100% |
| glycoprotein/polysaccharide metabolism protein | gi\|16763846 (SEQ ID NO: 269) | 19458.9 | 100% | 100% |
| O-acetyl serine sulfhydrylase | gi\|11514514 (SEQ ID NO: 270) | 34414.7 | 93% | 100% |
| 30S ribosomal subunit protein S21 | gi\|16766509 (SEQ ID NO: 271) | 8482.1 | 100% | 100% |
| ornithine decarboxylase isozyme | gi\|16764071 (SEQ ID NO: 272) | 82432.6 | 100% | 99% |
| fumarate reductase | gi\|16767591 (SEQ ID NO: 273) | 27157.3 | 100% | 100% |
| anaerobic glycerol-3-phosphate dehydrogenase subunit B | gi\|16765612 (SEQ ID NO: 274) | 45653.3 | 100% | 100% |
| glucose-specific PTS system enzyme IIA component | gi\|16765753 (SEQ ID NO: 275) | 18229.5 | 100% | 100% |
| DNA-directed RNA polymerase omega subunit | gi\|16767026 (SEQ ID NO: 276) | 10218.3 | 100% | 100% |
| FKBP-type peptidyl-prolyl cis-trans isomerase | gi\|16766744 (SEQ ID NO: 277) | 20767.9 | 100% | 100% |
| pyruvate dehydrogenase E1 component | gi\|16763542 (SEQ ID NO: 278) | 99564 | 100% | 97% |
| phosphate acetyltransferase | gi\|16765665 (SEQ ID NO: 279) | 77261.1 | 100% | 93% |
| cold shock-like protein cspE | gi\|16764006 (SEQ ID NO: 280) | 7433.5 | 0 | 93% |
| glucose-6-phosphate isomerase | gi\|16767471 (SEQ ID NO: 281) | 61412.3 | 100% | 93% |
| putative oxidase | gi\|16764715 (SEQ ID NO: 282) | 113118.3 | 93% | 99% |
| 50S ribosomal subunit protein L16 | gi\|16766722 (SEQ ID NO: 283) | 15176.6 | 100% | 100% |
| enterobactin synthetase component F | gi\|16763965 (SEQ ID NO: 284) | 141727.2 | 78% | 99% |
| 50S ribosomal subunit protein L2 | gi\|16766726 (SEQ ID NO: 285) | 29802.1 | 93% | 100% |
| acetyl-coenzyme A carboxylase subunit alpha | gi\|16763622 (SEQ ID NO: 286) | 35327.3 | 100% | 59% |
| aldose 1-epimerase | gi\|16764640 (SEQ ID NO: 287) | 32541.6 | 100% | 0 |
| pyruvate kinase | gi\|16765230 (SEQ ID NO: 288) | 51369.5 | 100% | 93% |
| outer membrane protein C | gi\|16765595** (SEQ ID NO: 289) | 41222.1 | 0 | 93% |
| serine hydroxymethyltransferase | gi\|16765875 (SEQ ID NO: 290) | 45437 | 100% | 93% |
| 50S ribosomal subunit protein L28 | gi\|16767013 (SEQ ID NO: 291) | 9032.6 | 93% | 93% |
| isoaspartyl dipeptidase | gi\|16767756 (SEQ ID NO: 292) | 40306.8 | 100% | 93% |
| sensory histidine kinase | gi\|16765598 (SEQ ID NO: 293) | 106264.3 | 100% | 79% |
| putative inner membrane lipoprotein | gi\|16765852 (SEQ ID NO: 294) | 179631.1 | 87% | 87% |
| Initiation factor IF-3 | gi\|16419853 (SEQ ID NO: 295) | 16619.9 | 100% | 100% |
| putative protease | gi\|16764427 (SEQ ID NO: 296) | 65586.3 | 99% | 97% |
| thiosulfate reductase electron transport protein PhsB | gi\|16765394 (SEQ ID NO: 297) | 21300.7 | 93% | 100% |
| dihydrolipoamide acetyltransferase | gi\|16764107 (SEQ ID NO: 298) | 43839.8 | 100% | 100% |
| protein-export protein SecB | gi\|16766986 (SEQ ID NO: 299) | 17227 | 100% | 100% |
| cytochrome d terminal oxidase polypeptide subunit I | gi\|16764110 (SEQ ID NO: 300) | 58299.5 | 100% | 100% |
| putative detox protein in ethanolamine utilization | gi\|16765785 (SEQ ID NO: 301) | 9824.4 | 100% | 100% |
| galactose transport protein | gi\|16765520 (SEQ ID NO: 302) | 35796.1 | 100% | 99% |
| putative translation initiation inhibitor | gi\|16767703 (SEQ ID NO: 303) | 13557.2 | 100% | 93% |
| dihydrolipoamide acetyltransferase | gi\|16763543 (SEQ ID NO: 304) | 66121.5 | 100% | 93% |
| glutamine ABC transporter periplasmic-binding protein | gi\|16764192 (SEQ ID NO: 305) | 27245.6 | 93% | 93% |
| putative selenocysteine synthase | gi\|16767692 (SEQ ID NO: 306) | 39874.5 | 47% | 93% |
| lysine decarboxylase 2 | gi\|16763624 (SEQ ID NO: 307) | 80747.8 | 0 | 93% |
| putative integral membrane protein | gi\|16764196 (SEQ ID NO: 308) | 59589.3 | 0 | 93% |
| 30S ribosomal protein S20 | gi\|16763433 (SEQ ID NO: 309) | 9637.9 | 100% | 93% |
| NADH dehydrogenase I chain G | gi\|16420864 (SEQ ID NO: 310) | 100254.5 | 100% | 100% |
| acetyl-CoA carboxylase | gi\|16766675 (SEQ ID NO: 311) | 49245.8 | 99% | 100% |
| phosphopentomutase | gi\|16767810 (SEQ ID NO: 312) | 44227.1 | 100% | 0 |
| RNase E | gi\|16764541 (SEQ ID NO: 313) | 119381.7 | 100% | 100% |
| fructose-1,6-bisphosphatase | gi\|16767661 (SEQ ID NO: 314) | 36781.5 | 100% | 100% |
| phosphoenolpyruvate synthase | gi\|16764700 (SEQ ID NO: 315) | 87191.6 | 100% | 100% |
| putative formate acetyltransferase | gi\|16765966 (SEQ ID NO: 316) | 14326.2 | 100% | 93% |
| aminopeptidase B | gi\|16765856 (SEQ ID NO: 317) | 46339 | 0 | 93% |
| lipoprotein | gi\|16765808 (SEQ ID NO: 318) | 36919.8 | 100% | 93% |
| D-ribose-binding protein | gi\|1070661 (SEQ ID NO: 319) | 28512.8 | 93% | 0 |
| oriT nickase/helicase | gi\|16445291 (SEQ ID NO: 320) | 191664 | 100% | 0 |
| sensory transduction histidine kinase | gi\|16764736 (SEQ ID NO: 321) | 65221.8 | 93% | 54% |
| sensory kinase in two-component system with CreB | gi\|16767830 (SEQ ID NO: 322) | 51666.7 | 93% | 59% |
| agmatinase | gi\|16766379 (SEQ ID NO: 323) | 33585.5 | 100% | 100% |
| aminoacyl-histidine dipeptidase | gi\|16763698 (SEQ ID NO: 324) | 52419.9 | 93% | 100% |
| DNA polymerase I | gi\|16767264 (SEQ ID NO: 325) | 103114.9 | 93% | 0 |
| glycerate kinase II | gi\|16763905 (SEQ ID NO: 326) | 39003.1 | 0 | 99% |
| 30S ribosomal subunit protein S19 | gi\|16766725 (SEQ ID NO: 327) | 10398.5 | 100% | 93% |
| ATPase subunit | gi\|7594817 (SEQ ID NO: 328) | 46171.1 | 100% | 0 |
| glucose-1-phosphate adenylyltransferase | gi\|16766822 (SEQ ID NO: 329) | 48444.5 | 100% | 83% |
| phosphoglyceromutase | gi\|16766989 (SEQ ID NO: 330) | 56237.5 | 100% | 0 |
| acetate kinase | gi\|16765664 (SEQ ID NO: 331) | 43240.3 | 100% | 92% |
| ABC superfamily peptide transport protein | gi\|16765039 (SEQ ID NO: 332) | 30654.8 | 48% | 100% |
| potassium-transporting ATPase subunit B | gi\|16764075 (SEQ ID NO: 333) | 72125 | 99% | 74% |
| adenylosuccinate synthetase | gi\|16767612 (SEQ ID NO: 334) | 47359.7 | 100% | 100% |
| putative periplasmic protein | gi\|16765796 (SEQ ID NO: 335) | 38706.3 | 100% | 0 |
| ATP synthase delta subunit | gi\|16767152 (SEQ ID NO: 336) | 19394.2 | 97% | 100% |
| glycerol dehydrogenase | gi\|16767374 (SEQ ID NO: 337) | 38723.5 | 100% | 96% |
| inositol-5-monophosphate dehydrogenase | gi\|16765831 (SEQ ID NO: 338) | 51930.1 | 100% | 0 |
| succinate dehydrogenase catalytic subunit | gi\|16764105 (SEQ ID NO: 339) | 26847.2 | 100% | 93% |
| FkbP-type peptidyl-prolyl cis-trans isomerase | gi\|16767643 (SEQ ID NO: 340) | 23719.2 | 100% | 93% |
| putative sigma(54) modulation protein | gi\|16765980 (SEQ ID NO: 341) | 12634.6 | 100% | 93% |
| putative ATP-dependent helicase | gi\|16765162 (SEQ ID NO: 342) | 70268.1 | 93% | 0 |
| ATP synthase epsilon subunit | gi\|16767148 (SEQ ID NO: 343) | 15046.6 | 100% | 93% |
| putative cytoplasmic protein | gi\|16765717 (SEQ ID NO: 344) | 10269.4 | 100% | 93% |
| needle complex major subunit PrgI | gi\|16766179 (SEQ ID NO: 345) | 8839.3 | 93% | 100% |
| cytochrome o ubiquinol oxidase subunit I | gi\|16763823 (SEQ ID NO: 346) | 74265.7 | 93% | 100% |
| hydrogenase 3 large subunit | gi\|16766155 (SEQ ID NO: 347) | 65003.1 | 100% | 0 |
| mannose-specific enzyme IIAB | gi\|16765171 (SEQ ID NO: 348) | 34969.2 | 100% | 0 |
| 30s ribosomal protein S6 | gi\|16767637** (SEQ ID NO: 349) | 15154.9 | 100% | 0 |
| fumarate reductase, flavoprotein subunit | gi\|16767592 (SEQ ID NO: 350) | 65473.9 | 93% | 100% |
| putative lipoprotein | gi\|16764058 (SEQ ID NO: 351) | 12218.6 | 72% | 96% |
| dipeptide transport protein | gi\|16766917 (SEQ ID NO: 352) | 60202.5 | 100% | 0 |
| phase 1 flagellin | gi\|16765297 (SEQ ID NO: 353) | 51594.5 | 100% | 100% |
| transcription termination factor Rho | gi\|16767192 (SEQ ID NO: 354) | 46977.2 | 100% | 100% |
| arginine deiminase | gi\|16767712 (SEQ ID NO: 355) | 45544.5 | 99% | 100% |
| D-fructose-6-phosphate amidotransferase | gi\|16767145 (SEQ ID NO: 356) | 66860.7 | 100% | 0 |
| tetrathionate reductase subunit A (TtrA) | gi\|16764733 (SEQ ID NO: 357) | 110976.9 | 97% | 0 |
| uridine phosphorylase | gi\|16422527 (SEQ ID NO: 358) | 27205.9 | 100% | 0 |
| ecotin precursor | gi\|16765590 (SEQ ID NO: 359) | 18199.7 | 0 | 100% |
| anaerobic dimethyl sulfoxide reductase chain B | gi\|16764326** (SEQ ID NO: 360) | 22761.6 | 100% | 0 |
| serine endoprotease | gi\|16766643 (SEQ ID NO: 361) | 47310.1 | 93% | 100% |
| putative fructose-1,6-bisphosphate aldolase | gi\|16767344 (SEQ ID NO: 362) | 31725.2 | 93% | 100% |
| NADH dehydrogenase I chain F | gi\|16765651 (SEQ ID NO: 363) | 49229.2 | 100% | 93% |
| small membrane protein A | gi\|16766000 (SEQ ID NO: 364) | 12327 | 93% | 100% |
| single-strand DNA-binding protein | gi\|16767506 (SEQ ID NO: 365) | 19055.5 | 93% | 100% |
| aldehyde oxidoreductase | gi\|3885918 (SEQ ID NO: 366) | 49239.5 | 93% | 100% |
| virulence-associated protein mkfB | gi\|7443056 (SEQ ID NO: 367) | 62570.6 | 100% | 0 |
| 3,4-dihydroxy-2-butanone 4-phosphate synthase | gi\|16766495 (SEQ ID NO: 368) | 23292.3 | 0 | 86% |
| PilQ ATP-binding protein | gi\|32470257 (SEQ ID NO: 369) | 58267.7 | 98% | 86% |
| prolyl-tRNA synthetase | gi\|16763631 (SEQ ID NO: 370) | 63522.6 | 100% | 0 |
| BipA GTPase | gi\|16767274 (SEQ ID NO: 371) | 67359.4 | 100% | 66% |
| 2-oxoglutarate dehydrogenase | gi\|16764106 (SEQ ID NO: 372) | 104805.9 | 0 | 100% |
| cytosine deaminase | gi\|16766629 (SEQ ID NO: 373) | 47608 | 100% | 0 |
| ribosome recycling factor | gi\|16763609 (SEQ ID NO: 374) | 20538 | 100% | 0 |
| dihydrodipicolinate synthase | gi\|16765809** (SEQ ID NO: 375) | 31276.4 | 100% | 0 |
| putative dehydrogenase | gi\|16765715 (SEQ ID NO: 376) | 77238.8 | 99% | 0 |
| TrpR binding protein WrbA | gi\|16764477 (SEQ ID NO: 377) | 20849.7 | 100% | 93% |
| outer membrane-bound fatty acid transporter | gi\|16765718 (SEQ ID NO: 378) | 47688.5 | 93% | 0 |
| catalase HPII | gi\|16764669 (SEQ ID NO: 379) | 83610.2 | 93% | 100% |
| putative cytoplasmic protein | gi\|16763672** (SEQ ID NO: 380) | 79560.5 | 99% | 0 |
| D-ribose-binding periplasmic protein | gi\|16767168 (SEQ ID NO: 381) | 30944.8 | 0 | 99% |
| 2-dehydro-3-deoxyphosphooctonate aldolase | gi\|16765113 (SEQ ID NO: 382) | 30777.4 | 93% | 0 |
| flagellar hook-associated protein | gi\|16765298 (SEQ ID NO: 383) | 49818.7 | 0 | 87% |
| cysteine desulfurase | gi\|16765863 (SEQ ID NO: 384) | 45075.7 | 0 | 83% |
| ethanolamine utilization protein EutL | gi\|16765776 (SEQ ID NO: 385) | 22678 | 100% | 81% |
| nikB plasmid protein | gi\|20521580 (SEQ ID NO: 386) | 103992.3 | 79% | 100% |
| periplasmic maltose-binding protein | gi\|16767479 (SEQ ID NO: 387) | 43468 | 100% | 0 |
| hydrogenase-3 accessory protein | gi\|16766161** (SEQ ID NO: 388) | 31375.2 | 0 | 99% |
| chemotactic response protein | gi\|16765257** (SEQ ID NO: 389) | 23902.4 | 100% | 0 |
| putative acetyltransferase | gi\|16765805 (SEQ ID NO: 390) | 74000 | 100% | 0 |
| putative imidazolonepropionase or amidohydrolase | gi\|16767659 (SEQ ID NO: 391) | 42408 | 0 | 100% |
| phosphoglucosamine mutase | gi\|16766590 (SEQ ID NO: 392) | 47424.2 | 100% | 0 |
| ATP-dependent RNA helicase | gi\|16765963 (SEQ ID NO: 393) | 50040.2 | 100% | 0 |
| asparagine synthetase B | gi\|16764050 (SEQ ID NO: 394) | 62555.9 | 0 | 100% |
| 50S ribosomal subunit protein L30 | gi\|16766711** (SEQ ID NO: 395) | 6495.8 | 0 | 100% |
| glutamine synthetase | gi\|16767272 (SEQ ID NO: 396) | 51768.7 | 100% | 0 |
| outer membrane protein Tsx | gi\|16763793 (SEQ ID NO: 397) | 32761.5 | 100% | 0 |
| ribonuclease R (RNase R) | gi\|16767614 (SEQ ID NO: 398) | 92033.1 | 99% | 0 |
| DNA-binding protein HU-beta | gi\|16763832 (SEQ ID NO: 399) | 9222 | 99% | 0 |
| 50S ribosomal subunit protein L23 | gi\|16766727** (SEQ ID NO: 400) | 11194.9 | 0 | 100% |
| membrane-bound ATP synthase, epsilon-subunit | gi\|6625704 (SEQ ID NO: 401) | 14848.1 | 0 | 100% |
| hydrogenase-2 small chain protein | gi\|16766450 (SEQ ID NO: 402) | 39604.2 | 0 | 100% |
| ATP synthase subunit C | gi\|16767150 (SEQ ID NO: 403) | 31538 | 0 | 100% |
| putative zinc-binding dehydrogenase | gi\|16764887 (SEQ ID NO: 404) | 37229 | 100% | 0 |
| transcriptional repressor for rbs operon (GalR/LacI family) | gi\|16767170 (SEQ ID NO: 405) | 36702.1 | 100% | 0 |
| ubiquinone/menaquinone methyltransferase UbiE | gi\|16767240 (SEQ ID NO: 406) | 28118.9 | 100% | 0 |
| phosphoheptose isomerase | gi\|16763693 (SEQ ID NO: 407) | 20878.5 | 100% | 0 |
| ClpB ATP-dependent protease | gi\|16765976 (SEQ ID NO: 408) | 95421.8 | 99% | 0 |
| putative pyrophosphatase | gi\|16766260 (SEQ ID NO: 409) | 30812.9 | 99% | 0 |
| precorrin-8X methylmutase | gi\|16765363 (SEQ ID NO: 410) | 23016.8 | 0 | 99% |
| translation initiation factor IF-2 | gi\|16766584 (SEQ ID NO: 411) | 97383.5 | 0 | 99% |
| putative GTP-binding protein | gi\|16766597 (SEQ ID NO: 412) | 43086.7 | 99% | 0 |
| ethanolamine ammonia-lyase heavy chain | gi\|16765778 (SEQ ID NO: 413) | 49432 | 0 | 99% |
| putative copper-transporting ATPase | gi\|16763878 (SEQ ID NO: 414) | 87893 | 0 | 99% |
| putative 5′-nucleotidase/2′,3′-cyclic phosphodiesterase | gi\|16767370 (SEQ ID NO: 415) | 56560 | 98% | 0 |
| hypothetical ABC transporter ATP-binding protein | gi\|16763887 (SEQ ID NO: 416) | 24467.3 | 98% | 0 |
| putative glycosyl transferase | gi\|16765625 (SEQ ID NO: 417) | 36500 | 98% | 0 |
| citrate lyase alpha chain | gi\|56967225 (SEQ ID NO: 418) | 54561.7 | 97% | 0 |

*Peptide samples obtained from MudPIT were analyzed using Sequest and X!Tandem software, and the data organized using the Scaffold program. To be considered a positive identification in Scaffold, the following parmeters were used: a minumum of 2 peptides from a given protein identified with peptide and protein thresholds of 80% to give an overall protein identification (ID) probability of at least 80%. Note that a protein ID probability of greater than 80% in at least one of the samples warranted inclusion in the table so as to allow identification of possible differential expression of a given protein.
**Proteins identified via MuDPIT analysis as differentially expressed that also displayed differential expression via microarray analysis.

TABLE 3
Spaceflight stimulon genes belonging to Hfq regulon or involved with iron utilization or biofilm formation

| | Fold | |
|---|---|---|
| Gene* | change | Function |
| Hfq regulon genes | | |
| Up-regulated | | |
| Outer membrane proteins | | |
| ompA (SEQ ID NO: 419) | 2.05 | outer membrane porin |
| ompC (SEQ ID NO: 420) | 2.44 | outer membrane porin |
| ompD (SEQ ID NO: 421) | 3.34 | outer membrane porin |
| Plasmid transfer apparatus | | |
| traB (SEQ ID NO: 422) | 4.71 | conjugative transfer, assembly |
| traN (SEQ ID NO: 423) | 4.24 | conjugative transfer, aggregate formation |
| trbA (SEQ ID NO: 424) | 3.14 | conjugative transfer |
| traK (SEQ ID NO: 425) | 2.91 | conjugative transfer |
| traD (SEQ ID NO: 426) | 2.87 | conjugative transfer, DNA transport |
| trbC (SEQ ID NO: 427) | 2.68 | conjugative transfer |
| traH (SEQ ID NO: 428) | 2.59 | conjugative transfer, assembly |
| traX (SEQ ID NO: 429) | 2.37 | conjugative transfer, fimbrial acetylation |
| traT (SEQ ID NO: 430) | 2.34 | conjugative transfer |
| trbB (SEQ ID NO: 431) | 2.32 | conjugative transfer |
| traG (SEQ ID NO: 432) | 2.21 | conjugative transfer, assembly |
| traF (SEQ ID NO: 433) | 2.11 | conjugative transfer |
| traR (SEQ ID NO: 434) | 1.79 | conjugative transfer |
| Various cellular functions | | |
| gapA (SEQ ID NO: 435) | 7.67 | glyceraldehyde-3-phosphate dehydrogenase A |
| sipC (SEQ ID NO: 436) | 6.27 | cell invasion protein |
| adhE (SEQ ID NO: 18) | 4.75 | iron-dependent alcohol dehydrogenase of AdhE |
| glpQ (SEQ ID NO: 22) | 2.58 | glycerophosphodiester phosphodiesterase, periplasmic |
| fliC (SEQ ID NO: 1) | 2.11 | flagellin, filament structural protein |
| sbmA (SEQ ID NO: 437) | 1.67 | putative ABC superfamily transporter |
| Down-regulated | | |
| Small RNAs | | |
| alpha RBS (SEQ ID NO: 438) | 0.305 | small RNA |
| rnaseP (SEQ ID NO: 439) | 0.306 | small RNA regulatory |
| csrB (SEQ ID NO: 84) | 0.318 | small RNA regulatory |
| tke1 (SEQ ID NO: 440) | 0.427 | small RNA |
| oxyS (SEQ ID NO: 441) | 0.432 | small RNA regulatory |
| RFN (SEQ ID NO: 442) | 0.458 | small RNA |
| rne5 (SEQ ID NO: 443) | 0.499 | small RNA |
| Ribosomal proteins | | |
| rpsL (SEQ ID NO: 105) | 0.251 | 30S ribosomal subunit protein S12 |
| rpsS (SEQ ID NO: 102) | 0.289 | 30S ribosomal subunit protein S19 |
| rplD (SEQ ID NO: 104) | 0.393 | 50S ribosomal subunit protein L4 |
| rpsF (SEQ ID NO: 107) | 0.401 | 30S ribosomal subunit protein S6 |
| rplP (SEQ ID NO: 101) | 0.422 | 50S ribosomal subunit protein L16 |
| rplA (SEQ ID NO: 106) | 0.423 | 50S ribosomal subunit protein L1 |
| rpme2 (SEQ ID NO: 95) | 0.473 | 50S ribosomal protein L31 (second copy) |
| rplY (SEQ ID NO: 444) | 0.551 | 50S ribosomal subunit protein L25 |
| Various cellular functions | | |
| ynaF (SEQ ID NO: 81) | 0.201 | putative universal stress protein |
| ygfE (SEQ ID NO: 445) | 0.248 | putative cytoplasmic protein |
| dps (SEQ ID NO: 80) | 0.273 | stress response DNA-binding protein |
| hfq (SEQ ID NO: 446) | 0.298 | host factor for phage replication, RNA chaperone |
| osmY (SEQ ID NO: 124) | 0.318 | hyperosmotically inducible periplasmic protein |
| mysB (SEQ ID NO: 70) | 0.341 | suppresses protein export mutants |
| rpoE (SEQ ID NO: 90) | 0.403 | sigma E (sigma 24) factor of RNA polymerase |
| cspD (SEQ ID NO: 447) | 0.421 | similar to CspA but not cold shock induced |
| Nlpb (SEQ ID NO: 138) | 0.435 | lipoprotein-34 |
| ygaC (SEQ ID NO: 158) | 0.451 | putative cytoplasmic protein |
| ygaM (SEQ ID NO: 116) | 0.453 | putative inner membrane protein |
| gltI (SEQ ID NO: 130) | 0.479 | ABC superfamily, glutamate/aspartate transporter |
| ppiB (SEQ ID NO: 129) | 0.482 | peptidyl-prolyl cis-trans isomerase B (rotamase B) |
| atpE (SEQ ID NO: 150) | 0.482 | membrane-bound ATP synthase, F0 sector, subunit c |
| yfiA (SEQ ID NO: 448) | 0.482 | ribosome associated factor, stabilizes against dissociation |
| trxA (SEQ ID NO: 151) | 0.493 | thioredoxin 1, redox factor |
| nifU (SEQ ID NO: 139) | 0.496 | NifU homologs involved in Fe—S cluster formation |
| rbfA (SEQ ID NO: 449) | 0.506 | ribosome-binding factor, role in processing of 10S rRNA |
| rseB (SEQ ID NO: 450) | 0.514 | anti-sigma E factor |
| yiaG (SEQ ID NO: 451) | 0.528 | putative transcriptional regulator |
| ompX (SEQ ID NO: 452) | 0.547 | outer membrane protease, receptor for phage OX2 |
| rnpA (SEQ ID NO: 453) | 0.554 | RNase P, protein component (protein C5) |
| hns (SEQ ID NO: 454) | 0.554 | DNA-binding protein; pleiotropic regulator |
| lamB (SEQ ID NO: 455) | 0.566 | phage lambda receptor protein; maltose high-affinity receptor |
| rmf (SEQ ID NO: 456) | 0.566 | ribosome modulation factor |
| tpx (SEQ ID NO: 457) | 0.566 | thiol peroxidase |
| priB (SEQ ID NO: 458) | 0.571 | primosomal replication protein N |
| Iron utilization/storage genes | | |
| adhE (SEQ ID NO: 18) | 4.76 | iron-dependent alcohol dehydrogenase of AdhE |
| entE (SEQ ID NO: 14) | 2.24 | 2,3-dihydroxybenzoate-AMP ligase |
| hydN (SEQ ID NO: 26) | 2.03 | electron transport protein (FeS senter) from formate to hydrogen |
| dmsC (SEQ ID NO: 133) | 0.497 | anaerobic dimethyl sulfoxide reductase, subunit C |
| nifU (SEQ ID NO: 139) | 0.495 | NifU homologs involved in Fe—S cluster formation |
| Fnr (SEQ ID NO: 89) | 0.494 | transcriptional regulator, iron-binding |
| fdnH (SEQ ID NO: 136) | 0.458 | formate dehydrogenase-N, Fe—S beta subunit, nitrate-inducible |
| frdC (SEQ ID NO: 152) | 0.411 | fumarate reductase, anaerobic, membrane anchor polypeptide |
| Bfr (SEQ ID NO: 147) | 0.404 | bacterioferrin, an iron storage homoprotein |
| ompW (SEQ ID NO: 112) | 0.276 | outer membrane protein W; colicin S4 receptor |
| Dps (SEQ ID NO: 80) | 0.273 | stress response DNA-binding protein and ferritin |
| Genes implicated in/associated | | |
| with biofilm formation | | |
| Wza (SEQ ID NO: 20) | 2.30 | putative polysaccharide export protein, outer membrane |
| wcaI (SEQ ID NO: 19) | 2.07 | putative glycosyl transferase in colanic acid biosynthesis |
| ompA (SEQ ID NO: 6) | 2.06 | outer membrane protein |
| wcaD (SEQ ID NO: 459) | 1.82 | putative colanic acid polymerase |
| wcaH (SEQ ID NO: 460) | 1.76 | GDP-mannose mannosyl hydrolase in colanic acid biosynthesis |
| manC (SEQ ID NO: 461) | 1.71 | mannose-1-phosphate guanylyltransferase |
| wcaG (SEQ ID NO: 462) | 1.68 | bifunctional GDP fucose synthetase in colanic acid biosyntheis |
| wcaB (SEQ ID NO: 463) | 1.64 | putative acyl transferase in colanic acid biosynthesis |
| fimH (SEQ ID NO: 464) | 1.61 | fimbrial subunit |
| fliS (SEQ ID NO: 465) | 0.339 | flagellar biosynthesis |
| flgM (SEQ ID NO: 466) | 0.343 | flagellar biosynthesis |
| flhD (SEQ ID NO: 467) | 0.356 | flagellar biosynthesis |
| fliE (SEQ ID NO: 468) | 0.438 | flagellar biosynthesis |
| fliT (SEQ ID NO: 469) | 0.444 | flagellar biosynthesis |
| cheY (SEQ ID NO: 76) | 0.461 | chemotaxic response |
| cheZ (SEQ ID NO: 470) | 0.535 | chemotaxic response |

### REFERENCES

[0080] 1. Grigoriev, A. I., Svetaylo, E. N. & Egorov, A. D. (1998) Environ Med 42, 83-94.
[0081] 2. Sonnenfeld, G. & Shearer, W. T. (2002) Nutrition 18, 899-903.
[0082] 3. Taylor, G. R. (1993) J Leukoc Biol 54, 202-8.
[0083] 4. Taylor, G. R., Konstantinova, I., Sonnenfeld, G. & Jennings, R. (1997) Adv Space Biol Med 6, 1-32.
[0084] 5. Nickerson, C. A., Ott, C. M., Mister, S. J., Morrow, B. J., Burns-Keliher, L. & Pierson, D. L. (2000) Infect Immun 68, 3147-52.
[0085] 6. Nickerson, C. A., Ott, C. M., Wilson, J. W., Ramamurthy, R. & Pierson, D. L. (2004) Microbiol Mol Biol Rev 68, 345-61.
[0086] 7. Wilson, J. W., Ramamurthy, R., Porwollik, S., McClelland, M., Hammond, T., Allen, P., Ott, C. M., Pierson, D. L. & Nickerson, C. A. (2002) Proc Natl Acad Sci USA 99, 13807-12.
[0087] 8. Figueroa-Bossi, N., Lemire, S., Maloriol, D., Balbontin, R., Casadesus, J. & Bossi, L. (2006) Mol Microbiol 62, 838-52.
[0088] 9. Masse, E. & Gottesman, S. (2002) Proc Natl Acad Sci USA 99, 4620-5.
[0089] 10. Muffler, A., Traulsen, D. D., Fischer, D., Lange, R. & Hengge-Aronis, R. (1997) J Bacteriol 179, 297-300.
[0090] 11. Vecerek, B., Moll, I., Afonyushkin, T., Kaberdin, V. & Blasi, U. (2003) Mol Microbiol 50, 897-909.
[0091] 12. Guisbert, E., Rhodius, V. A., Ahuja, N., Witkin, E. & Gross, C. A. (2007) J Bacteriol 189, 1963-73.
[0092] 13. Sittka, A., Pfeiffer, V., Tedin, K. & Vogel, J. (2007) Mol Microbiol 63, 193-217.
[0093] 14. Valentin-Hansen, P., Eriksen, M. & Udesen, C. (2004) Mol Microbiol 51, 1525-33.
[0094] 15. Valentin-Hansen, P., Johansen, J. & Rasmussen, A. A. (2007) Curr Opin Microbiol 10, 152-5.
[0095] 16. Will, W. R. & Frost, L. S. (2006) J Bacteriol 188, 124-31.
[0096] 17. Hammond, T. G. & Hammond, J. M. (2001) Am J Physiol Renal Physiol 281, F12-25.
[0097] 18. Nickerson, C. A. & Ott, C. M. (2004) ASM News 70, 169-175.
[0098] 19. Nickerson, C. A., Ott, C. M., Wilson, J. W., Ramamurthy, R., LeBlanc, C. L., Honer zu Bentrup, K., Hammond, T. & Pierson, D. L. (2003) J Microbiol Methods 54, 1-11.
[0099] 20. Little, B., Wagner, P., Ray, R., Pope, R. & Scheetz, R. (1991) J Ind Microbiol 8, 213-222.
[0100] 21. Priester, J. H., Horst, A. M., Van de Werfhorst, L. C., Saleta, J. L., Mertes, L. A. & Holden, P. A. (2007) J Microbiol Methods 68, 577-87.
[0101] 22. Wilson, J. W. & Nickerson, C. A. (2006) BMC Evol Biol 6, 2.
[0102] 23. Reed, L. J. & Muench, H. (1938) Am J Hyg 27, 493-497.
[0103] 24. Nickerson, C. A., Goodwin, T. J., Terlonge, J., Ott, C. M., Buchanan, K. L., Uicker, W. C., Emami, K., LeBlanc, C. L., Ramamurthy, R., Clarke, M. S., Vanderburg, C. R., Hammond, T. & Pierson, D. L. (2001) Infect Immun 69, 7106-20.
[0104] 25. Navarre, W. W., Porwollik, S., Wang, Y., McClelland, M., Rosen, H., Libby, S. J. & Fang, F. C. (2006) Science 313, 236-8.
[0105] 26. Zhang, A., Wassarman, K. M., Rosenow, C., Tjaden, B. C., Storz, G. & Gottesman, S. (2003) Mol Microbiol 50, 1111-24.
[0106] 27. Cooper, B., Eckert, D., Andon, N. L., Yates, J. R. & Haynes, P. A. (2003) J Am Soc Mass Spectrom 14, 736-41.
[0107] 28. Qian, W. J., Liu, T., Monroe, M. E., Strittmatter, E. F., Jacobs, J. M., Kangas, L. J., Petritis, K., Camp, D. G., 2nd & Smith, R. D. (2005) J Proteome Res 4, 53-62.
[0108] 29. Craig, R. & Beavis, R. C. (2004) Bioinformatics 20, 1466-7.
[0109] 30. Eng, J. K., McCormack, A. L. & Yates, J. R. (1994) J Am Soc Mass Spectrom 5, 976-989.

### Example 2

### Media Ion Content Inhibits Increased Microbial Virulence During Spaceflight

[0110] This example describes experiments designed to test the hypothesis that ion concentrations could be manipulated to prevent the enhanced Salmonella virulence imparted during flight. Salmonella cultured in varying media conditions aboard STS-115 and STS-123 were analyzed. These experiments allowed the identification of a) media ion composition that prevents spaceflight-induced increases in Salmonella virulence, and b) commonalities and differences in Salmonella gene expression between growths of the same pathogen in different media during spaceflight. As with spaceflight growth in LB, Salmonella grown in M9 media during flight displayed differential expression of many genes, including those associated with either the regulation of, or regulation by the Hfq protein and small regulatory RNAs. Salmonella grown in various media demonstrated that ion concentrations had a direct effect on the virulence of the cultures. Moreover, higher concentrations of phosphate ions present in M9 medium during spaceflight analogue culture altered its pathogenic-related effects, thus providing the first evidence of a mechanism behind this response.

### Material and Methods

[0111] Strains and Media. The virulent, mouse-passaged Salmonella typhimurium derivative of SL1344 termed F3339 was used in all experiments¹⁸. Lennox broth (LB) (10 g tryptone, 5 g yeast extract, 5 g NaCl)¹⁹, M9 medium (0.4% glucose)⁹, or LB-M9 salts medium were used as the growth media in all experiments. Phosphate buffered saline (PBS) (Invitrogen, Carlsbad, Calif.) was used to resuspend bacteria for use as inoculum in the flight and ground hardware. The LB-M9 salts medium consisted of LB medium supplemented with the following amounts of ions: 8.54 mM NaCl, 25.18 mM NaH₂PO₄, 18.68 mM NH₄Cl, 22 mM KH₂PO₄, and 2 mM MgSO₄. The RNA fixative RNA Later II (Ambion, Austin, Tex.), was used to preserve nucleic acid and protein. Bacterial cell culture, microarray analysis, MudPIT proteomics, murine infections, and acid stress assays were performed as described previously¹. qRT-PCR analysis was performed with primers hybridizing to the indicated genes as described previously using the 16S rRNA gene to normalize samples²⁰. Data from three to nine separate technical replicate reactions was used for each gene in FIG. 7, and the differences in expression were found to be statistically significant using student's t-test (p-value<0.05). The sequences of the primers used here are as follows. Determination of inorganic ion levels in LB and M9 media was performed using inductively coupled plasma (ICP) spectrometry and ion chromatography (IC) as described previously²¹.

Primers used in this study
for qRT-PCR

5Sal16S
(SEQ ID No: 865)
gtaacggctcaccaaggcgacgatccctag
Sal16S3
(SEQ ID No: 866)
cttcgccaccggtattcctccagatctctac
5STM1724 (for trpD)
(SEQ ID No: 867)
agcgcctttgtcgcggcggcctgtgga
STM17243 (for trpD)
(SEQ ID No: 868)
gttgatcagcgggccgagtacgttgaacag
5rnpB
(SEQ ID No: 869)
gtcgtggacagtcattcatctaggccagca
rnpB3
(SEQ ID No: 870)
ctccatagggcagggtgccaggtaacgcct
5csrB
(SEQ ID No: 871)
tttcctgtgaccttacggcctgttcatcctg
csrB3
(SEQ ID No: 872)
agcaggacacgccaggatggtgttacaagg
5yfiD
(SEQ ID No: 873)
tacgagcgataacgtcgcgctgctgttccg
yfiD3
(SEQ ID No: 874)
gctgaattccttctggctgctggacagcga

[0112] Bacterial cell culture. Spaceflight and ground cultures were grown in specialized hardware termed fluid processing apparatus (FPA) as described previously¹. Briefly, an FPA consists of a glass barrel that can be divided into compartments via the insertion of rubber stoppers and a lexan sheath into which the glass barrel is inserted. Each compartment in the glass barrel was filled with a solution in an order such that the solutions would be mixed at specific time points in flight via two actions: (1) downward plunging action on the rubber stoppers and (2) passage of the fluid in a given compartment through a bevel on the side of the glass barrel such that it was released into the compartment below. Glass barrels and rubber stoppers were coated with a silicone lubricant (Sigmacote, Sigma, St. Louis, Mo.) and autoclaved separately before assembly. A stopper with a gas exchange membrane was inserted just below the bevel in the glass barrel before autoclaving. FPA assembly was performed aseptically in a laminar flow hood in the following order: 2.0 ml media (either LB, M9 or LB-M9) on top of the gas exchange stopper, one rubber stopper, 0.5 ml PBS containing bacterial inoculum (approximately 6.7×10⁶ bacteria), another rubber stopper, 2.5 ml of either RNA fixative (for gene expression analysis) or media (either LB, M9 or LB-M9 for virulence studies), and a final rubber stopper. Syringe needles (gauge 25⅝) were inserted into rubber stoppers during this process to release air pressure and facilitate assembly. To facilitate group activation of FPAs and to ensure proper containment levels, sets of 8 FPAs were loaded into larger containers termed group activation packs (GAPs). All ground control cultures were incubated in the Orbital Environmental Simulator (OES) room at the Kennedy Space Center, which is linked in real-time to the Shuttle and maintains identical temperature and humidity conditions. After activation, cultures were grown for 25 hours in either spaceflight or ground until either fixation or media supplementation. Upon landing, cultures were received for processing approximately 2.5 hours after Shuttle touchdown.

[0113] Microarray analysis. Total cellular RNA purification from cultures grown in M9 media, preparation of fluorescently labeled, single stranded cDNA probes, probe hybridization to whole genome S. typhimurium microarrays, and image acquisition was performed as previously described^{1,8} using three biological and three technical replicates for each culture condition. Direct microscopic cell counting and spectrophotometric readings indicated that cell numbers in flight and ground biological replicate cultures differed by less than 2-fold. Data analysis was performed using software as described previously¹. To obtain the genes comprising the spaceflight stimulon in M9 media, the following parameters were used in Webarray software²²: an expression ratio of flight to ground of 1.8 fold or greater or 0.6 or less; a spot quality (Avalue) of greater than 9.5, and p-value of less than 0.05. To identify spaceflight stimulon genes also contained in the Hfq regulon, proteins or genes found to be regulated by Hfq or RNAs found to be bound by Hfq as reported in the indicated references were scanned against the spaceflight microarray data for expression changes within the parameters above¹¹⁻¹⁴.

[0114] Multidimensional protein identification (MudPIT) analysis via tandem mass spectrometry coupled to dual nano-liquid chromatography (LC-LC-MS/MS). Acetone-protein precipitates from whole cell lysates obtained from flight and ground cultures grown in M9 media (representing three biological replicates) were subjected to MudPIT analysis using the LC-LC-MS/MS technique (three technical replicates) as described previously^{1,23,24}. Tandem MS spectra of peptides were analyzed with TurboSEQUEST™ v 3.1 and XTandem software, and the data were further analyzed and organized using the Scaffold program^{1,23,24}. Table 6 describes the specific parameters used in Scaffold to identify the proteins in this study.

[0115] Murine infection assay. Six to eight week old female Balb/c mice (housed in the Animal Facility at the Space Life Sciences Lab at Kennedy Space Center) were deprived of food and water for approximately 6 hours and then per-orally infected with increasing dosages of S. typhimurium harvested from either flight or ground FPA cultures and resuspended in buffered saline gelatin¹. Infectious dosages increasing ten-fold in a range between approximately 1×10⁴ and 1×10⁹ bacteria (thus comprising six infectious dosages per bacterial culture) were used in the infections. Ten mice per infectious dosage were used, 20 μl per dose, and food and water were returned to the animals within 30 minutes post-infection. The infected mice were monitored every 6-12 hours for 30 days. The LD₅₀ value was calculated using the formula of Reed and Muench²⁵.

[0116] Ground based RWV cultures and acid stress assays. S. typhimurium cultures were grown in rotating wall vessels (RWVs) for 24 hours at 37 degrees C. in the LSMMG and 1×g orientations in LB, M9, or LB media supplemented with the indicated ions from M9 salts (LB-M9 salts media) and assayed for resistance to pH 3.5 as described previously^{1,15}. The percentage of surviving bacteria present after 45-60 minutes acid stress (compared to the original number of bacteria before addition of the stress) was calculated via serial dilution and CFU plating. A ratio of the percent survival values for the LSMMG and 1×g cultures in all three growth media was obtained (indicating the fold difference in survival between these cultures) and is presented as the acid survival ratio in FIG. 8. The mean and standard deviation from between two and five independent experimental trials per culture is presented with observed differences in survival ratios being statistically-significant at p-value<0.05.

### Results

[0117] Media and virulence in spaceflight±LB. Previous flight experiments aboard STS-115 indicated that S. typhimurium cultured during spaceflight exhibited increased virulence in a murine model of infection¹. Briefly, bacteria cultured in LB during spaceflight and identical ground control cultures were harvested and immediately used to inoculate female Balb/c mice via a per-oral route of infection on the same day as Shuttle landing. Mice were infected at increasing dosages of either flight or ground cultures (10 mice per dose), and the health of the mice was monitored every 6-12 hours for 30 days. Previous results showed that mice infected with S. typhimurium grown in LB media in spaceflight aboard STS-115 displayed a decreased time to death and a 2.7 fold decrease in LD50 value compared with those infected with ground control cultures¹. To confirm these findings, the identical flight experiment was performed again aboard STS-123. In agreement with the previous experiment, mice infected with S. typhimurium grown in spaceflight aboard STS-123 displayed a decreased time to death and a 6.9 fold decrease in LD50 value compared with those infected with ground control cultures (FIG. 6, panels 6A, 6B, and 6C, LB medium).

[0118] Media and virulence in spaceflight±M9. Because of the strong association between nutrient composition of the growth media and the extent of changes observed in S. typhimurium responses in ground-based studies in the RWV, we evaluated S. typhimurium virulence using cultures grown in M9 minimal media in separate experiments aboard Space Shuttle missions STS-115 and STS-123. The procedures were otherwise identical to those described for LB media growth. However, M9 cultures from both missions displayed dramatically different virulence characteristics from those observed with LB cultured bacteria (FIGS. 6A-6C). Specifically, for infection of mice with spaceflight and ground Salmonella cultures grown in M9 media, the time to death curves overlapped and did not display the decreased time to death as seen in the LB spaceflight infections in both STS-115 and STS-123. Likewise, in contrast to observations with the LB media cultures, M9 grown cultures of S. typhimurium grown in spaceflight displayed no consistent difference in LD50 from ground controls.

[0119] To further elucidate the effect of media composition on the virulence characteristics of S. typhimurium grown during spaceflight, an additional growth medium was used that consisted of LB media supplemented with specific salts used in the preparation of M9 media. These specific salts were chosen because our quantitative trace elemental analysis showed them to be at significantly different levels in the two media. Specifically, the elemental analysis indicated that the M9 medium had dramatically higher concentrations of phosphate (61-fold higher than the LB media) and magnesium (18-fold higher than the LB media). Other notable differences in the M9 medium included higher levels of sulfate (3.6-fold higher than the LB media), chloride (3-fold higher than the LB media), and potassium (2.4-fold higher than the LB media). Thus, as follow-up flight experiment aboard STS-123, S. typhimurium virulence was evaluated using cultures grown in LB media supplemented with 25.18 mM NaH₂PO₄, 22 mM KH₂PO₄, 18.68 mM NH₄Cl, 8.54 mM NaCl, and 2 mM MgSO₄ (designated as LB-M9 salts media), thereby bringing the levels of these salts in LB media to the same as those in M9 media. Interestingly, Salmonella cultured in LB-M9 salts media displayed virulence characteristics similar to those observed when only the M9 media was used (FIGS. 6A and 6C). Specifically, as seen with cultures grown in only M9 media, mice infected with spaceflight and ground cultures grown in LB-M9 salts media did not display the decreased time to death with spaceflight grown cultures as seen in the LB infections. Also in contrast to the LB media cultures, cultures of S. typhimurium grown in LB-M9 salts media during spaceflight did not display a decreased LD50 value compared to ground controls using the same media (similar to the results with M9 media). Since nutrient composition could influence the virulence of S. typhimurium¹⁰, the LD50 values were compared for all media from flight and all media from ground controls from the STS-123 flight to highlight the effect of spaceflight on virulence (Table 4). A comparison of LD50 values from ground controls suggests that indeed media plays a role in LD50 levels, with a 5.7 fold difference between LB media and M9 media (with LB showing lower LD50 values). However, a comparison of LD50 values of cultures grown during spaceflight shows a dramatic difference approximately 10 times greater than those observed in ground cultures, as shown with a 56.8 fold difference between LB media and M9 media. This difference suggests that while media composition does affect LD50 values, the difference is exacerbated by the spaceflight environment. This indicates that there was something unique about the spaceflight environment that led to increased virulence in Salmonella.

[0120] Transcriptional and proteomic analysis. To determine which Salmonella genes changed expression in response to spaceflight culture in M9 minimal media, total bacterial RNA was isolated from fixed flight and ground samples, qualitatively analyzed to ensure lack of degradation, quantified, and then reversed transcribed into labeled, single-stranded cDNA. The labeled cDNA was co-hybridized with differentially-labeled S. typhimurium genomic DNA to whole genome S. typhimurium microarray slides. Statistically-significant differences in gene expression between the flight and ground M9 samples (above 1.8-fold increase and below 0.6-fold decrease in expression) were obtained (see Materials and Methods for details). 38 genes were found differentially-expressed in flight M9 cultures as compared to identical ground controls under these conditions (Table 5). Most notably, several genes involved in motility (9 genes: flgA, flgC, flgF, flgG, cheY, fliC, fliT, fliM, fljB), the formation of the Hyc hydrogenase (4 genes: hydN, hycF, hycD, hyB), and the Suf membrane transporter (3 genes: sufA, sufC, yhnA/sufE) were identified as differentially expressed. In addition, several genes encoding small regulatory RNA molecules (THI, csrB, rnpB, tke1) were also identified. The proteomes of fixed cultures from M9 flight and ground samples were also obtained via multi-dimensional protein identification (MudPIT) analysis. 173 proteins were identified as expressed in the flight and ground cultures, with 81 being present at statistically different levels in these samples (Table 6) indicating differential expression or stability. Notably, several proteins involved iron utilization and uptake (Fur, cytoplasmic ferritin, F—S cluster formation, bactoferrin, siderophore receptor TonB, iron transport protein, iron-dependent alcohol dehydrogenase, and ferric enterobactin receptor) and ribosome structure (L7, L32, S20, S13, S11 S19, L14, L33, S4, L4) were identified as differentially expressed. Collectively, these transcriptional and proteomic gene expression changes form the first documented bacterial spaceflight stimulon in minimal growth media.

[0121] The LB and M9 spaceflight stimulons. The S. typhimurium gene expression data from the analysis above in M9 medium were compared with the results from our previous gene expression analysis in LB medium for spaceflight and RWV cultures. Genes from each data set were cross-compared to each other to identify common genes that were present as differentially-expressed in both media. After this analysis, 15 genes (including adjacent genes) of the 38 identified as transcriptionally altered in response to spaceflight in M9 medium were also identified as differentially expressed in either spaceflight or ground-based microgravity analogue RWV culture in LB medium. This represents 39% ( 15/38) of the total genes found in the M9 transcriptional analysis.

[0122] This analysis was subsequently extended to include genes that also belong to the same directly-related functional or regulatory gene group (i.e. not necessarily the same gene or operon, but genes that function or are regulated as part of the same mechanism such as motility), and discovered that the percentage of common genes between analysis in M9 and LB media was 73% ( 28/38) (Table 5). The functional groups of genes that we identified as regulated by spaceflight or ground-based spaceflight analogue culture in both M9 and LB media included those involved in flagellar-based motility, Hyc hydrogenase formation, Suf transporter formation and other ABC transporters, and small regulatory RNA molecules (genes indicated in the section above). Additionally, there are also 8 “stand alone” genes that are believed to be not co-regulated with these gene groups and include four genes encoding putative, uncharacterized proteins (yaiA, trpD, yfiA, yhcB, grxB, acpP, yfiD, STM4002). Several genes encoding proteins identified in the spaceflight and ground proteomic analysis of M9 cultures were also identified in the gene expression analysis of M9 and LB cultures as well (Table 6).

[0123] Results from our previous studies indicated that 32% of the S. typhimurium genes identified as differentially regulated in spaceflight in LB medium belonged to a regulon of genes controlled by the conserved RNA-binding protein Hfq¹. A requirement of hfq for alterations in Salmonella acid resistance and macrophage survival was demonstrated in response to a ground-based microgravity analogue model¹. Therefore, the results of our spaceflight M9 microarray and proteomic analysis were scanned for members of a regulon of genes whose expression and activity is regulated by or regulates Hfq, or whose protein products form a functional regulatory complex with Hfq¹¹⁻¹⁴. Consistent with the previous observations in LB, four small non-coding regulatory RNA genes (THI, csrB, rnpB, tke1) and three mRNA transcripts (rpoS, sufE, fliC) regulated by Hfq were observed in the microarray analysis in M9 media (7 of 38 or 18%).

[0124] When the hits from the proteomic analysis were scanned for relationships to the Hfq regulon, 28 of the 81 proteins (34%) found to be differentially expressed in response to spaceflight in M9 media belonged to the Hfq regulon, or are part of a directly related functional group of proteins that are regulated by Hfq. Several observations led to the Hfq regulon members being highlighted in our M9 proteomic analysis: 1) Hfq promotes the expression of a large class of ribosomal structural proteins, and we found differential expression of several of these genes in spaceflight (L7/L12, L32, S20, S13, S11, S19, SA, L14, L33, S4, L4); 2) Hfq regulates the expression of the Fur protein and other genes involved in iron metabolism, and we found that Fur and other iron-related genes are differentially regulated by spaceflight in M9 medium (Fur, Dps, NifU, FepA); 3) Several other proteins encoded by genes belonging to the Hfq regulon were also found in this analysis: NmpC, Tpx, PtsI, PtsH, SucC, LeuB, CysP, DppA, OppA, RpoZ, CsrA, RpoB, NlpB. This data, taken together with the microarray data, indicates the commonalities of the spaceflight response in Salmonella in both LB and M9 media, and represents the first common genes that have been identified to be regulated by spaceflight and/or ground based spaceflight analogue culture in both rich and minimal media.

[0125] Real time PCR analysis. To further confirm the commonalities observed in global gene expression analysis in response to spaceflight in both LB and M9 media, targeted quantitative real time PCR assays were performed using cDNA synthesized from total RNA harvested from spaceflight and ground cultures in LB and M9 media as templates (FIG. 7). The csrB, yfiD, rnpB genes (down-regulated), and the trpD gene (up-regulated) were found to be differentially-regulated in response to spaceflight as compared to ground cultures in both LB and M9 media using global transcriptional analysis. These results were also found using real time PCR (FIG. 7).

[0126] Role of phosphate ion. Salmonella was previously demonstrated to consistently and reproducibly alter its acid tolerance response when grown in the RWV using LB medium¹⁵. To support findings from spaceflight that the supplementation of LB media with selected M9 salts disrupts S. typhimurium responses to this environment, cultures containing LB media, M9 media, and LB-M9 salts media were grown in the RWV at low shear modeled microgravity (LSMMG) and control orientations and evaluated for changes in acid tolerance. As demonstrated previously, cultures of S. typhimurium grown in LB media in the RWV (LSMMG) displayed altered acid resistance as compared to control cultures. However, no difference in acid tolerance was observed with cultures grown in M9 media or in LB-M9 salts media (FIG. 8). LB media supplemented with different combinations of M9 salts were then used to determine which of these ions was responsible for disruption of the acid tolerance response observed in LB medium (FIG. 8). The results indicate that the presence of phosphate from two different sources (NaH₂PO₄ and KH₂PO₄) is sufficient to disrupt the altered acid tolerance in response to LSMMG. Although hydrogen ions are present in each of these compounds, we found no correlation between the pH of the different media before or after culture and the observed phenotypes. Likewise, this indicates that the buffering capacity of phosphate is not responsible for this phenotype and that the presence of the phosphate ion itself is responsible for the acid tolerance alteration. In addition, increased osmolarity of the media is not the cause of this phenotype, since raising the level of NaCl to 25 mM (the same level as Na₂HPO₄ and KH₂PO₄) did not show the same phenotype as the presence of the phosphate-containing compounds (FIG. 8).

### Conclusion

[0127] It was found that the increased S. typhimurium virulence observed with cultures grown in spaceflight in LB medium as compared to identical ground controls is not exhibited with cultures grown in M9 medium. Based upon the quantified differences in ion concentrations between LB and M9 media, LB medium was supplemented with inorganic ions to the same levels as those found in M9 medium. This supplementation was sufficient to prevent the enhanced Salmonella virulence imparted during flight. Subsequent testing in ground-based spaceflight analogue culture conditions indicted that the altered acid tolerance exhibited by Salmonella during culture in LB alone was prevented with the addition of inorganic phosphate. These results demonstrate a direct correlation between phosphate ion concentration and the phenotypic response of Salmonella to the environment of spaceflight analogue culture. The spaceflight-induced molecular genetic responses of S. typhimurium cultured in different growth media (LB versus M9) were also compared using whole genome transcriptional and proteomic analyses. Despite the multiple phenotypic differences in response to spaceflight between the two media, several common genes and gene families were altered in expression in both media during spaceflight culture. Identification of these genes whose expression is commonly regulated by the low fluid shear environment of spaceflight provides key targets whose expression can be manipulated to control microbial responses, including use for development of vaccines and therapeutics. As identified in this study, these targets include gene systems involved in flagellar-based motility, Hyc hydrogenase formation, Suf transporter formation and other ABC transporters, ribosomal structure, iron utilization, and small regulatory RNA molecule expression and function. Many of the genes that were found differentially expressed during spaceflight culture of S. typhimurium in M9 media were also consistent with those reported in LB culture for this same organism under identical conditions. In both cases, many of these genes are found in regulons that are controlled by or regulate the activity of the Hfq protein. The findings further highlight Hfq as a global regulator to target for further study to understand the mechanism used by Salmonella to respond to spaceflight, spaceflight analogue systems, and other physiological low fluid shear environments.

TABLE 4
LD50 comparison of S. typhimurium cultured in M9 media or LB-M9
salts media relative to cultures grown only in LB media.

| Media | Growth Location | LD50 (CFU) | |
|---|---|---|---|
| | | | Media - Flight |
| | | | Fold Increase |
| | | | Relative to LB |
| LB media | Flight | 5.81 × 10⁴ | 1.0 |
| LB-M9 salts | Flight | 7.45 × 10⁵ | 12.8 |
| media | | | |
| M9 media | Flight | 3.30 × 10⁶ | 56.8 |
| | | | Fold Increase |
| | | | Relative to LB |
| | | | Media - Ground |
| LB media | Ground | 4.02 × 10⁵ | 1.0 |
| LB-M9 salts | Ground | 5.73 × 10⁵ | 1.4 |
| media | | | |
| M9 media | Ground | 2.30 × 10⁶ | 5.7 |

TABLE 5
Salmonella typhimurium genes altered in expression during growth in M9 minimal media
in spaceflight

| | Fold | Identified in | Gene | |
|---|---|---|---|---|
| STM gene | change | LB analysis* | name | Gene function |
| Up-regulated | | | | |
| STM_sRNA_THI (SEQ ID NO: | 2.69 | x | THI** | small RNA |
| 471) | | | | |
| STM0007 (SEQ ID NO: 472) | 1.91 | | talB | transaldolase B |
| STM0389 (SEQ ID NO: 473) | 1.85 | x | yaiA | putative cytoplasmic protein |
| STM1161.S (SEQ ID NO: 474) | 2.64 | | yceP | putative cytoplasmic protein |
| STM1369 (SEQ ID NO: 475) | 2.81 | x | sufA | putative HesB-like domain |
| STM1371 (SEQ ID NO: 476) | 2.65 | x | sufC | putative ABC superfamily (atp_bind) transport protein |
| STM1374 (SEQ ID NO: 477) | 1.84 | x | ynhA | putative SufE protein probably involved in Fe—S center |
| | | | | assembly |
| STM1724 (SEQ ID NO: 478) | 1.96 | x | trpD | anthranilate synthase, component II, bifunctional |
| STM2665 (SEQ ID NO: 448) | 2.53 | x | yfiA | ribosome associated factor, stabilizes ribosomes |
| | | | | against dissociation |
| STM2924 (SEQ ID NO: 479) | 2.55 | | rpoS | sigma S (sigma 38) factor of RNA polymerase |
| STM3347 (SEQ ID NO: 122) | 1.83 | x | yhcB | putative periplasmic protein |
| STM3559 (SEQ ID NO: 480) | 2.05 | | yhhV | putative cytoplasmic protein |
| STM3809.S (SEQ ID NO: 481) | 1.83 | | ibpA | small heat shock protein |
| STM4161 (SEQ ID NO: 482) | 2.00 | | | putative involved in thiamine biosynthesis |
| Down-regulated | | | | |
| STM_PSLT014 (SEQ ID NO: | 0.52 | | orf6 | putative outer membrane protein |
| 483) | | | | |
| STM_sRNA_CsrB (SEQ ID | 0.51 | x | csrB | regulatory RNA |
| NO: 84) | | | | |
| STM_sRNA_RNaseP (SEQ ID | 0.44 | x | rnpB | regulatory RNA |
| NO: 484) | | | | |
| STM_sRNA_tke1 (SEQ ID NO: | 0.58 | x | tke1 | small RNA |
| 440) | | | | |
| STM1078 (SEQ ID NO: 485) | 0.43 | | | putative cytoplasmic protein |
| STM1165 (SEQ ID NO: 486) | 0.57 | x | grxB | glutaredoxin 2 |
| STM1173 (SEQ ID NO: 487) | 0.57 | x | flgA | flagellar biosynthesis; assembly of basal-body |
| | | | | periplasmic P ring |
| STM1175 (SEQ ID NO: 488) | 0.37 | x | flgC | flagellar biosynthesis, cell-proximal portion of basal- |
| | | | | body rod |
| STM1178 (SEQ ID NO: 489) | 0.52 | x | flgF | flagellar biosynthesis, cell-proximal portion of basal- |
| | | | | body rod |
| STM1179 (SEQ ID NO: 490) | 0.47 | x | flgG | flagellar biosynthesis, cell-distal portion of basal-body |
| | | | | rod |
| STM1196 (SEQ ID NO: 134) | 0.59 | x | acpP | acyl carrier protein |
| STM1466 (SEQ ID NO: 491) | 0.59 | | ydgA | putative periplasmic protein |
| STM1916 (SEQ ID NO: 76) | 0.55 | x | cheY | chemotaxis regulator, transmits chemoreceptor signals |
| | | | | to flagelllar motor |
| STM1959 (SEQ ID NO: 1) | 0.44 | x | fliC | flagellar biosynthesis; flagellin, filament structural |
| | | | | protein |
| STM1962 (SEQ ID NO: 78) | 0.54 | x | fliT | flagellar biosynthesis; possible export chaperone for |
| | | | | FliD |
| STM1976 (SEQ ID NO: 492) | 0.59 | x | fliM | flagellar biosynthesis, component of motor switch and |
| | | | | energizing |
| STM2646 (SEQ ID NO: 141) | 0.44 | x | yfiD | putative formate acetyltransferase |
| STM2771 (SEQ ID NO: 493) | 0.31 | x | fljB | Flagellar synthesis: phase 2 flagellin (filament structural |
| | | | | protein) |
| STM2843 (SEQ ID NO: 26) | 0.49 | x | hydN | electron transport protein (FeS senter) from formate to |
| | | | | hydrogen |
| STM2848 (SEQ ID NO: 494) | 0.59 | x | hycF | hydrogenase 3, putative quinone oxidoreductase |
| STM2850 (SEQ ID NO: 495) | 0.59 | x | hycD | hydrogenase 3, membrane subunit (part of FHL |
| | | | | complex) |
| STM2852 (SEQ ID NO: 496) | 0.52 | x | hycB | hydrogenase-3, iron-sulfur subunit (part of FHL |
| | | | | complex) |
| STM4002 (SEQ ID NO: 162) | 0.53 | x | | putative cytoplasmic protein |
| STM4063 (SEQ ID NO: 497) | 0.55 | | sbp | ABC superfamily (bind_prot), sulfate transport protein |

*Genes, operons, or directly-related functional groups identified as also being differnetially-regulated during growth in spaceflight or ground-based modeled microgravity in LB medium
**STM genome coordinates: 4382782-4382542

TABLE 6
Salmonella typhimurium proteins identified via MudPit analysis as present
during growth in M9 minimal media in spaceflight (173 proteins total)

| | | Protein | Flight | Ground |
|---|---|---|---|---|
| | | molecular | total cell | total cell |
| | Accession | weight | protein ID | protein ID |
| Protein name | number | (Daltons) | probability* | probability* |
| sn-glycerol-3-phosphate dehydrogenase | gi\|16766813 (SEQ ID NO: 187) | 57 kDa | 100% (100%) | 99% (99%) |
| branched-chain-amino-acid transaminase | gi\|96710 (SEQ ID NO: 498) | 34 kDa | 99% (99%) | 100% (100%) |
| putative periplasmic protein | gi\|16764930 (SEQ ID NO: 499) | 39 kDa | 100% (100%) | 100% (100%) |
| 6,7-dimethyl-8-ribityllumazine synthase | gi\|16501685 (SEQ ID NO: 500) | 16 kDa | 100% (100%) | 100% (100%) |
| thioredoxin reductase | gi\|16502122 (SEQ ID NO: 501) | 35 kDa | 100% (100%) | 100% (100%) |
| 50S ribosomal subunit protein L2 | gi\|16505152 (SEQ ID NO: 502) | 30 kDa | 100% (100%) | 100% (100%) |
| 30S ribosomal protein S10 | gi\|68057571 (SEQ ID NO: 503) | 12 kDa | 100% (100%) | 100% (100%) |
| 50S ribosomal protein L24 | gi\|15803836 (SEQ ID NO: 504) | 11 kDa | 100% (100%) | 100% (100%) |
| serine hydroxymethyltransferase | gi\|16503768 (SEQ ID NO: 505) | 45 kDa | 100% (100%) | 100% (100%) |
| 30s ribosomal protein S6 | gi\|16505516 (SEQ ID NO: 506) | 15 kDa | 100% (100%) | 100% (100%) |
| 30S ribosomal protein S22 | gi\|16502603 (SEQ ID NO: 507) | 5 kDa | 100% (100%) | 100% (100%) |
| 2,3,4,5-tetrahydropyridine-2-carboxylate N- | gi\|16763603 (SEQ ID NO: 508) | 30 kDa | 100% (100%) | 100% (100%) |
| succinyltransferase | | | | |
| peptidyl-prolyl cis-trans isomerase B | gi\|16501803 (SEQ ID NO: 509) | 18 kDa | 100% (100%) | 100% (100%) |
| FKBP-type peptidyl-prolyl cis-trans isomerase | gi\|16766744 (SEQ ID NO: 277) | 21 kDa | 100% (100%) | 100% (100%) |
| ribosome recycling factor | gi\|16501500 (SEQ ID NO: 510) | 21 kDa | 100% (100%) | 100% (100%) |
| carbamoyl-phosphate synthase large subunit | gi\|16763457 (SEQ ID NO: 511) | 118 kDa | 100% (100%) | 100% (100%) |
| ATP synthase delta subunit | gi\|16504763 (SEQ ID NO: 512) | 19 kDa | 100% (100%) | 100% (100%) |
| FKBP-type peptidyl-prolyl cis-trans isomerase | gi\|16766742 (SEQ ID NO: 513) | 29 kDa | 99% (99%) | 100% (100%) |
| putative cytoplasmic protein | gi\|56383221 (SEQ ID NO: 514) | 12 kDa | 99% (99%) | 100% (100%) |
| D-3-phosphoglycerate dehydrogenase | gi\|16766363 (SEQ ID NO: 515) | 44 kDa | 100% (100%) | 100% (100%) |
| 50S ribosomal subunit protein L3 | gi\|16505149 (SEQ ID NO: 516) | 22 kDa | 100% (100%) | 100% (100%) |
| ATP synthase alpha subunit | gi\|16504764 (SEQ ID NO: 517) | 55 kDa | 100% (100%) | 100% (100%) |
| serine endoprotease | gi\|16766643 (SEQ ID NO: 361) | 47 kDa | 100% (100%) | 100% (100%) |
| putative ABC-type transport system ATPase | gi\|16763890 (SEQ ID NO: 518) | 30 kDa | 99% (99%) | 100% (100%) |
| ATP synthase subunit B | gi\|16504762 (SEQ ID NO: 519) | 17 kDa | 99% (99%) | 100% (100%) |
| malate dehydrogenase | gi\|16766654 (SEQ ID NO: 238) | 32 kDa | 99% (99%) | 100% (100%) |
| RNase E | gi\|16764541 (SEQ ID NO: 313) | 119 kDa | 100% (100%) | 100% (100%) |
| osmotically inducible protein C | gi\|16502605 (SEQ ID NO: 520) | 15 kDa | 99% (99%) | 100% (100%) |
| polynucleotide phosphorylase | gi\|16766580 (SEQ ID NO: 236) | 77 kDa | 100% (100%) | 100% (100%) |
| glutamate dehydrogenase | gi\|16764650 (SEQ ID NO: 521) | 49 kDa | 100% (100%) | 100% (100%) |
| menaquinone biosynthesis protein | gi\|16504650 (SEQ ID NO: 522) | 17 kDa | 99% (99%) | 100% (100%) |
| 50S ribosomal subunit protein L18 | gi\|16505166 (SEQ ID NO: 523) | 13 kDa | 99% (99%) | 100% (100%) |
| phospho-2-dehydro-3-deoxyheptonate aldolase | gi\|16503824 (SEQ ID NO: 524) | 39 kDa | 99% (99%) | 100% (100%) |
| transketolase | gi\|16766377 (SEQ ID NO: 199) | 72 kDa | 99% (99%) | 100% (100%) |
| acetylglutamate kinase | gi\|16767387 (SEQ ID NO: 525) | 27 kDa | 99% (99%) | 100% (100%) |
| 50S ribosomal protein L11 | gi\|15804573 (SEQ ID NO: 526) | 15 kDa | 99% (99%) | 100% (100%) |
| cold shock protein CspC | gi\|15802236 (SEQ ID NO: 527) | 7 kDa | 100% (100%) | 100% (100%) |
| unnamed protein product | gi\|47736 (SEQ ID NO: 528) | 16 kDa | 100% (100%) | 100% (100%) |
| dihydrolipoamide dehydrogenase | gi\|16763544 (SEQ ID NO: 186) | 51 kDa | 100% (100%) | 100% (100%) |
| 50S ribosomal subunit protein L29 | gi\|16505157 (SEQ ID NO: 260) | 7 kDa | 100% (100%) | 100% (100%) |
| arginine-binding periplasmic protein 1 precursor | gi\|16502093 (SEQ ID NO: 529) | 27 kDa | 100% (100%) | 100% (100%) |
| 50S ribosomal subunit protein L10 | gi\|47916 (SEQ ID NO: 530) | 18 kDa | 100% (100%) | 100% (100%) |
| hyperosmotically-inducible periplasmic protein | gi\|16505665 (SEQ ID NO: 531) | 21 kDa | 100% (100%) | 100% (100%) |
| bacterioferritin comigratory protein | gi\|16503708 (SEQ ID NO: 532) | 18 kDa | 100% (100%) | 100% (100%) |
| glutamate/aspartate transporter | gi\|16764042 (SEQ ID NO: 533) | 34 kDa | 100% (100%) | 100% (100%) |
| 50S ribosomal subunit protein L17 | gi\|16505176 (SEQ ID NO: 534) | 14 kDa | 100% (100%) | 100% (100%) |
| 50S ribosomal subunit protein L6 | gi\|16505165 (SEQ ID NO: 535) | 19 kDa | 100% (100%) | 100% (100%) |
| fructose 1,6-bisphosphate aldolase | gi\|16504152 (SEQ ID NO: 536) | 39 kDa | 100% (100%) | 100% (100%) |
| 30S ribosomal protein S3 | gi\|16131193 (SEQ ID NO: 537) | 26 kDa | 100% (100%) | 100% (100%) |
| 5-methyltetrahydropteroyltriglutamate--homocysteine | gi\|16767235 (SEQ ID NO: 538) | 85 kDa | 100% (100%) | 100% (100%) |
| methyltransferase | | | | |
| phosphate acetyltransferase | gi\|16765665 (SEQ ID NO: 279) | 77 kDa | 99% (99%) | 100% (100%) |
| inorganic pyrophosphatase | gi\|16505542 (SEQ ID NO: 539) | 20 kDa | 100% (100%) | 100% (100%) |
| phase 1 flagellin | gi\|50830926 (SEQ ID NO: 540) | 52 kDa | 99% (99%) | 100% (100%) |
| histone like DNA-binding protein HU-alpha | gi\|16504591 (SEQ ID NO: 541) | 10 kDa | 100% (100%) | 100% (100%) |
| (NS2) (HU-2) | | | | |
| Iron transport protein, periplasmic-binding protein | gi\|16503939 (SEQ ID NO: 542) | 34 kDa | 100% (100%) | 100% (100%) |
| conserved hypothetical protein | gi\|16503804 (SEQ ID NO: 543) | 14 kDa | 100% (100%) | 100% (100%) |
| ribosomal protein S7 | gi\|47922 (SEQ ID NO: 544) | 18 kDa | 100% (100%) | 100% (100%) |
| ATP synthase beta subunit | gi\|16504766 (SEQ ID NO: 545) | 50 kDa | 100% (100%) | 100% (100%) |
| 30S ribosomal protein S2 | gi\|16501497 (SEQ ID NO: 546) | 27 kDa | 100% (100%) | 100% (100%) |
| glucose-specific PTS system enzyme IIA component | gi\|47658 (SEQ ID NO: 547) | 18 kDa | 100% (100%) | 100% (100%) |
| probable peroxidase | gi\|16501671 (SEQ ID NO: 548) | 22 kDa | 100% (100%) | 100% (100%) |
| 50S ribosomal subunit protein L5 | gi\|16505162 (SEQ ID NO: 549) | 20 kDa | 100% (100%) | 100% (100%) |
| argininosuccinate lyase | gi\|16767388 (SEQ ID NO: 550) | 50 kDa | 100% (100%) | 100% (100%) |
| RNA polymerase, alpha subunit | gi\|24053769 (SEQ ID NO: 551) | 37 kDa | 100% (100%) | 100% (100%) |
| glycine/betaine/proline transport protein | gi\|16766122 (SEQ ID NO: 552) | 36 kDa | 100% (100%) | 100% (100%) |
| elongation factor Ts | gi\|16501498 (SEQ ID NO: 553) | 30 kDa | 100% (100%) | 100% (100%) |
| inositol-5-monophosphate dehydrogenase | gi\|16765831 (SEQ ID NO: 338) | 52 kDa | 100% (100%) | 100% (100%) |
| putative outer membrane lipoprotein | gi\|16763634 (SEQ ID NO: 554) | 29 kDa | 100% (100%) | 100% (100%) |
| DNA-directed RNA polymerase, beta-subunit | gi\|16504603 (SEQ ID NO: 555) | 155 kDa | 100% (100%) | 100% (100%) |
| GroEL protein | gi\|16505460 (SEQ ID NO: 556) | 57 kDa | 100% (100%) | 100% (100%) |
| enolase | gi\|16504025 (SEQ ID NO: 557) | 46 kDa | 100% (100%) | 100% (100%) |
| glyceraldehyde 3-phosphate dehydrogenase A | gi\|16502901 (SEQ ID NO: 558) | 36 kDa | 100% (100%) | 100% (100%) |
| translation elongation factor EF-Tu.A | gi\|96718 (SEQ ID NO: 169) | 43 kDa | 100% (100%) | 100% (100%) |
| iron-dependent alcohol dehydrogenase | gi\|16765093 (SEQ ID NO: 193) | 96 kDa | 100% (100%) | 100% (100%) |
| phosphoglycerate kinase | gi\|16504153 (SEQ ID NO: 559) | 41 kDa | 100% (100%) | 100% (100%) |
| putative hydrogenase membrane component precurosr | gi\|16764429 (SEQ ID NO: 171) | 38 kDa | 100% (100%) | 100% (100%) |
| formate acetyltransferase 1 | gi\|16502136 (SEQ ID NO: 560) | 85 kDa | 100% (100%) | 100% (100%) |
| 30S ribosomal protein S1 | gi\|16502144 (SEQ ID NO: 561) | 61 kDa | 100% (100%) | 100% (100%) |
| elongation factor G | gi\|47923 (SEQ ID NO: 562) | 78 kDa | 100% (100%) | 100% (100%) |
| 30S ribosomal subunit protein S5 | gi\|24053777 (SEQ ID NO: 563) | 18 kDa | 100% (100%) | 100% (100%) |
| O-Acetylserine Sulfhydrylase | gi\|11514514 (SEQ ID NO: 270) | 34 kDa | 100% (100%) | 100% (100%) |
| trigger factor | gi\|16501718 (SEQ ID NO: 564) | 48 kDa | 100% (100%) | 100% (100%) |
| Glutamine Synthetase | gi\|9256972 (SEQ ID NO: 565) | 52 kDa | 100% (100%) | 100% (100%) |
| molecular chaperone DnaK | gi\|16763402 (SEQ ID NO: 179) | 69 kDa | 100% (100%) | 100% (100%) |
| arginine-binding periplasmic protein 2 precursor | gi\|16502090 (SEQ ID NO: 566) | 27 kDa | 100% (100%) | 100% (100%) |
| alkyl hydroperoxide reductase c22 protein | gi\|16501859 (SEQ ID NO: 567) | 21 kDa | 100% (100%) | 100% (100%) |
| 50S ribosomal protein L9 | gi\|16767640 (SEQ ID NO: 216) | 16 kDa | 100% (100%) | 100% (100%) |
| outer membrane protein OmpH precursor | gi\|16501506 (SEQ ID NO: 568) | 18 kDa | 100% (100%) | 100% (100%) |
| glutamine-binding periplasmic protein precursor | gi\|16502041 (SEQ ID NO: 569) | 27 kDa | 100% (100%) | 100% (100%) |
| GroES protein | gi\|16505459 (SEQ ID NO: 570) | 10 kDa | 100% (100%) | 100% (100%) |
| 50S ribosomal subunit protein L1 | gi\|16504607 (SEQ ID NO: 571) | 25 kDa | 100% (100%) | 100% (100%) |
| outer membrane protein C | gi\|16503494 (SEQ ID NO: 572) | 41 kDa | 100% (100%) | 100% (100%) |
| dipeptide transport protein | gi\|16766917 (SEQ ID NO: 352) | 60 kDa | 100% (100%) | |
| PTS system protein HPr | gi\|24052838 (SEQ ID NO: 573) | 9 kDa | 100% (100%) | |
| 50S ribosomal subunit protein L7/L12 | gi\|47917 (SEQ ID NO: 574) | 12 kDa | 100% (100%) | |
| 50S ribosomal subunit protein L32 | gi\|24051382 (SEQ ID NO: 575) | 6 kDa | 100% (100%) | |
| oligopeptide transport protein | gi\|39546324 (SEQ ID NO: 576) | 61 kDa | 100% (100%) | |
| high-affinity branched-chain amino acid transporter | gi\|16766853 (SEQ ID NO: 577) | 39 kDa | 100% (100%) | |
| 30S ribosomal protein S20 | gi\|16501327 (SEQ ID NO: 578) | 10 kDa | 100% (100%) | |
| phosphoribosylaminoimidazole carboxylase catalytic | gi\|16763914 (SEQ ID NO: 579) | 18 kDa | 100% (100%) | |
| subunit | | | | |
| putative translation initiation inhibitor | gi\|16505567 (SEQ ID NO: 580) | 14 kDa | 100% (100%) | |
| putative multicopper oxidase | gi\|16763558 (SEQ ID NO: 581) | 59 kDa | 100% (100%) | |
| DNA protection during starvation protein | gi\|16502042 (SEQ ID NO: 582) | 19 kDa | 100% (100%) | |
| thioredoxin | gi\|67005950 (SEQ ID NO: 583) | 12 kDa | 100% (100%) | |
| sulfate transport protein | gi\|16767329 (SEQ ID NO: 584) | 37 kDa | 100% (100%) | |
| ribulose-phosphate 3-epimerase | gi\|16766771 (SEQ ID NO: 585) | 24 kDa | 99% (99%) | |
| cytoplasmic ferritin | gi\|16765276 (SEQ ID NO: 258) | 19 kDa | 99% (99%) | |
| osmotically inducible lipoprotein E precursor | gi\|16502880 (SEQ ID NO: 586) | 12 kDa | 100% (100%) | |
| fructose-bisphosphate aldolase class I | gi\|16503381 (SEQ ID NO: 587) | 38 kDa | 100% (100%) | |
| 30S ribosomal protein S13 | gi\|16766707** (SEQ ID NO: 202) | 13 kDa | 100% (100%) | |
| thiosulfate transport protein | gi\|16765764 (SEQ ID NO: 588) | 38 kDa | 100% (100%) | |
| histidine-binding periplasmic protein | gi\|47731 (SEQ ID NO: 589) | 28 kDa | 100% (100%) | |
| RecA protein | gi\|16503906 (SEQ ID NO: 590) | 38 kDa | 100% (100%) | |
| aspartate semialdehyde dehydrogenase | gi\|2353187 (SEQ ID NO: 591) | 43 kDa | 100% (100%) | |
| transcription elongation factor NusA | gi\|16766585** (SEQ ID NO: 245) | 55 kDa | 100% (100%) | |
| pyruvate kinase | gi\|16764728 (SEQ ID NO: 220) | 51 kDa | 99% (99%) | |
| 30S ribosomal protein S11 | gi\|16766706** (SEQ ID NO: 265) | 14 kDa | 99% (99%) | |
| DNA-directed RNA polymerase omega subunit | gi\|15804190 (SEQ ID NO: 592) | 10 kDa | 99% (99%) | |
| single-strand DNA-binding protein | gi\|16505243 (SEQ ID NO: 593) | 19 kDa | 99% (99%) | |
| DNA-binding protein HU-beta | gi\|581767 (SEQ ID NO: 594) | 9 kDa | 99% (99%) | |
| putative cytoplasmic protein | gi\|6851082 (SEQ ID NO: 595) | 19 kDa | 99% (99%) | |
| succinyl-CoA synthetase beta chain | gi\|16501970 (SEQ ID NO: 596) | 41 kDa | 99% (99%) | |
| 50S ribosomal subunit protein A | gi\|56383471 (SEQ ID NO: 597) | 7 kDa | 99% (99%) | |
| ATPase subunit | gi\|7594817 (SEQ ID NO: 328) | 46 kDa | 99% (99%) | |
| ketol-acid reductoisomerase | gi\|16767185 (SEQ ID NO: 598) | 54 kDa | 98% (98%) | |
| DNA ligase | gi\|16765747 (SEQ ID NO: 599) | 73 kDa | 99% (99%) | |
| 30S ribosomal subunit protein S19 | gi\|16505153 (SEQ ID NO: 600) | 10 kDa | 100% (100%) | |
| NifU-like protein involved in Fe—S cluster formation | gi\|16503756 (SEQ ID NO: 601) | 14 kDa | 99% (99%) | |
| putative sigma(54) modulation protein | gi\|16503819 (SEQ ID NO: 602) | 13 kDa | 99% (99%) | |
| 3-isopropylmalate dehydrogenase | gi\|16763502** (SEQ ID NO: 603) | 40 kDa | 99% (99%) | |
| bacterioferrin | gi\|16766732** (SEQ ID NO: 604) | 18 kDa | 99% (99%) | |
| glycerate kinase II | gi\|16763905** (SEQ ID NO: 326) | 39 kDa | 99% (99%) | |
| DNA polymerase I | gi\|16767264 (SEQ ID NO: 325) | 103 kDa | 99% (99%) | |
| putative periplasmic protein | gi\|16764812 (SEQ ID NO: 605) | 54 kDa | 99% (99%) | |
| threonine dehydratase | gi\|16767181 (SEQ ID NO: 606) | 56 kDa | 98% (98%) | |
| putative universal stress protein UspA | gi\|16501866 (SEQ ID NO: 607) | 16 kDa | 99% (99%) | |
| ferric uptake regulator Fur | gi\|16501929 (SEQ ID NO: 608) | 17 kDa | 99% (99%) | |
| Cell division protease ftsH | gi\|16504361 (SEQ ID NO: 609) | 71 kDa | 99% (99%) | |
| flavodoxin | gi\|16764064 (SEQ ID NO: 610) | 20 kDa | 99% (99%) | |
| nitrate reductase 2 beta subunit | gi\|16764922 (SEQ ID NO: 611) | 59 kDa | 99% (99%) | |
| keto-hydroxyglutarate-aldolase/keto-deoxy- | gi\|16765226 (SEQ ID NO: 612) | 22 kDa | 99% (99%) | |
| phosphogluconate aldolase | | | | |
| carbon storage regulator CsrA | gi\|24053109 (SEQ ID NO: 613) | 7 kDa | 99% (99%) | |
| rmlC dTDP-4,deoxyrhamnose 3,5 epimerase | gi\|581655 (SEQ ID NO: 614) | 21 kDa | 99% (99%) | |
| TonB-dependent siderophore receptor protein | gi\|16766089 (SEQ ID NO: 615) | 79 kDa | | 100% |
| N-succinyldiaminopimelate- | gi\|16766756 (SEQ ID NO: 616) | 44 kDa | | 100% |
| aminotransferase/acetylornithine transaminase | | | | |
| DNA-directed RNA polymerase beta subunit | gi\|16767407 (SEQ ID NO: 235) | 151 kDa | | 100% |
| argininosuccinate synthase | gi\|39546365 (SEQ ID NO: 617) | 50 kDa | | 100% |
| outer membrane lipoprotein SlyB precursor | gi\|16502764 (SEQ ID NO: 618) | 16 kDa | | 100% |
| thiol peroxidase | gi\|16765025 (SEQ ID NO: 619) | 18 kDa | | 100% |
| 50S ribosomal subunit protein L14 | gi\|49613467 (SEQ ID NO: 620) | 14 kDa | | 100% |
| triosephosphate isomerase | gi\|16767347 (SEQ ID NO: 210) | 27 kDa | | 100% |
| lipoprotein | gi\|16765808** (SEQ ID NO: 216) | 37 kDa | | 100% |
| oligopeptidase A | gi\|1676688** (SEQ ID NO: 621) | 77 kDa | | 100% |
| phosphoribosylamine--glycine ligase | gi\|16767429 (SEQ ID NO: 622) | 46 kDa | | 100% |
| phosphoglyceromutase | gi\|16764136 (SEQ ID NO: 623) | 28 kDa | | 100% |
| cystathionine gamma-synthase | gi\|16767366 (SEQ ID NO: 624) | 42 kDa | | 100% |
| glucose-6-phosphate isomerase | gi\|16767471 (SEQ ID NO: 281) | 61 kDa | | 100% |
| 50S ribosomal subunit protein L33 | gi\|24054147 (SEQ ID NO: 625) | 6 kDa | | 100% |
| ribosomal protein S4 | gi\|2780215 (SEQ ID NO: 626) | 23 kDa | | 100% |
| PEP-protein phosphotransferase | gi\|16765752** (SEQ ID NO: 627) | 63 kDa | | 100% |
| Lpp1 major outer membrane lipoprotein | gi\|37785814 (SEQ ID NO: 628) | 8 kDa | | 100% |
| aldose 1-epimerase | gi\|16764640** (SEQ ID NO: 287) | 33 kDa | | 100% |
| putative outer membrane porin precursor | gi\|16764916** (SEQ ID NO: 197) | 40 kDa | | 99% |
| 50S ribosomal protein L4 | gi\|15803846 (SEQ ID NO: 629) | 22 kDa | | 100% |
| outer membrane ferric enterobactin receptor precursor | gi\|16763962 (SEQ ID NO: 630) | 83 kDa | | 100% |
| hypothetical protein STM2795 putative LysM domain | gi\|16766106** (SEQ ID NO: 631) | 16 kDa | | 100% |
| phosphoribosylaminoimidazole-succinocarboxamide | gi\|16503704 (SEQ ID NO: 632) | 27 kDa | | 100% |
| synthase | | | | |
| arnithine carbamoyltransferase | gi\|312706 (SEQ ID NO: 633) | 24 kDa | | 100% |
| ribonucleoside-diphosphate reductase | gi\|1184247 (SEQ ID NO: 634) | 81 kDa | | 100% |
| biotin carboxylase | gi\|16504442 (SEQ ID NO: 635) | 49 kDa | | 100% |
| 3-ketoacyl-(acyl-carrier-protein) reductase | gi\|16764550 (SEQ ID NO: 636) | 26 kDa | | 100% |
| 6-phosphofructokinase II | gi\|16764677 (SEQ ID NO: 637) | 33 kDa | | 100% |
| uroporphyrinogen III methylase | gi\|16767207 (SEQ ID NO: | 42 kDa | | 100% |
| | 638) | | | |

*Peptide samples obtained from MudPIT were analyzed using Sequest and X!Tandem software, and the data was organized using the Scaffold program. To be considered a positive identification in Scaffold, the following parameters were used: a minimum of 2 peptides from a given protein identified with peptide and protein thresholds of 80% to give an overall protein identification (ID) probability of at least 80%. Note that a protein ID probability of greater than 80% in at least one of the samples warranted inclusion in the table so as to allow identification of possible differential expression of a given protein.
**Peptides encoded by genes or operons also found to be differentially regulated in spaceflight or ground based modeled microgravity in LB medium

### REFERENCES

[0128] 1. Wilson, J. W. et al. Space flight alters bacterial gene expression and virulence and reveals a role for global regulator Hfq. Proc Natl Acad Sci USA 104 (41), 16299-16304 (2007).
[0129] 2. Aertsen, A & Michiels, CW Stress and how bacteria cope with death and survival. Crit Rev Microbiol 30, 263-273 (2004).
[0130] 3. Rychlik, I. & Barrow, P. A. Salmonella stress management and its relevance to behaviour during intestinal colonisation and infection. FEMS Microbiol Rev 29 (5), 1021-1040 8 (2005).
[0131] 4. Foster, J. W. Escherichia coli acid resistance: tales of an amateur acidophile. Nat Rev Microbiol 2 (11), 898-907 (2004).
[0132] 5. Beeson, J. G. et al. Adhesion of Plasmodium falciparum-infected erythrocytes to hyaluronic acid in placental malaria. Nat Med 6 (1), 86-90 (2000).
[0133] 6. Cai, Z., Xin, J., Pollock, D. M., & Pollock, J. S. Shear stress-mediated NO production in inner medullary collecting duct cells. Am J Physiol Renal Physiol 279 (2), F270-274 15 (2000).
[0134] 7. Guo, P., Weinstein, A. M., & Weinbaum, S. A hydrodynamic mechanosensory hypothesis for brush border microvilli. Am J Physiol Renal Physiol 279 (4), F698-712 18 (2000).
[0135] 8. Wilson, J. W. et al. Microarray analysis identifies Salmonella genes belonging to the low-shear modeled microgravity regulon. Proc Natl Acad Sci USA 99 (21), 1380721 13812 (2002).
[0136] 9. Wilson, J. W. et al. Low-Shear modeled microgravity alters the Salmonella enterica serovar typhimurium stress response in an RpoS-independent manner. Appl Environ 24 Microbiol 68 (11), 5408-5416 (2002).
[0137] 10. Adkins, J. N. et al. Analysis of the Salmonella typhimurium Proteome through Environmental Response toward Infectious Conditions. Mol Cell Proteomics 5 (8), 145027 1461 (2006).
[0138] 11. Figueroa-Bossi, N. et al. Loss of Hfq activates the sigmaE-dependent envelope stress response in Salmonella enterica. Mol Microbiol 62 (3), 838-852 (2006).
[0139] 12. Guisbert, E. et al. Hfq modulates the sigmaE-mediated envelope stress response and the sigma-mediated cytoplasmic stress response in Escherichia coli. J Bacteriol 189 (5), 32 1963-1973 (2007).
[0140] 13. Sittka, A., Pfeiffer, V., Tedin, K., & Vogel, J. The RNA chaperone Hfq is essential for the virulence of Salmonella typhimurium. Mol Microbiol 63 (1), 193-217 (2007).
[0141] 14. Zhang, A. et al. Global analysis of small RNA and mRNA targets of Hfq. Mol Microbiol 50 (4), 1111-1124 (2003).
[0142] 15. Nickerson, C. A. et al. Microgravity as a novel environmental signal affecting Salmonella enterica serovar Typhimurium virulence. Infect Immun 68 (6), 3147-3152 (2000).
[0143] 16. Ruiz, Natividad & Silhavy, Thomas J. Constitutive Activation of the Escherichia coli Pho Regulon Upregulates rpoS Translation in an Hfq-Dependent Fashion. J. Bacteriol. 185 41 (20), 5984-5992 (2003).
[0144] 17. Vanderpool, C. K. & Gottesman, S. Involvement of a novel transcriptional activator and small RNA in post-transcriptional regulation of the glucose phosphoenolpyruvate phosphotransferase system. Mol Microbiol 54 (4), 1076-1089 (2004).
[0145] 18. Gulig, P. A. & Curtiss, R., 3rd Plasmid-associated virulence of Salmonella typhimurium. Infect Immun 55 (12), 2891-2901 (1987).
[0146] 19. Lennox, E. S. Transduction of linked genetic characters of the host by bacteriophage P1. Virology 1 (2), 190-206 (1955).
[0147] 20. Crabbe, A. et al. Use of the rotating wall vessel technology to study the effect of shear stress on growth behaviour of Pseudomonas aeruginosa PA01. Environ Microbiol (2008).
[0148] 21. ASTM Method D4327, Standard Test Method for Anions in Water by Chemically Suppressed Ion Chromatography. ASTM Method D4327, Standard Test Method for Anions in Water by Chemically Suppressed Ion Chromatography, ASTM International, West Conshohocken, Pa., www.astm.org.
[0149] 22. Xia, X, McClelland, M, & Wang, Y WebArray: an online platform for microarray data analysis. BMC Bioinformatics 6, 306 (2005).
[0150] 23. Keller, A., Nesvizhskii, A. I., Kolker, E., & Aebersold, R. Empirical statistical model to estimate the accuracy of peptide identifications made by MS/MS and database search. Anal Chem 74 (20), 5383-5392 (2002).
[0151] 24. Nesvizhskii, A. I., Keller, A., Kolker, E., & Aebersold, R. A statistical model for identifying proteins by tandem mass spectrometry. Anal Chem 75 (17), 4646-4658 (2003).
[0152] 25. Reed, L. J. & Muench, H. A simple method of estimating fifty percent endpoints. Am J Hyg 27, 493-497 (1938).

### Example 3

[0153] This example describes a general protocol for culturing a live attenuated Salmonella enterica serovar Typhimurium vaccine strain under low sedimental shear conditions, and to evaluate the immunogenicity of the vaccine strain cultured in this manner in a mouse model. A recombinant attenuated Salmonella enterica serovar Typhimurium anti-pneumococcal vaccine strain x9558 (Δpmi-2426 Δ(gmd-fcl)-26 ΔPfur₃₃::TTaraCP_{BAD}fur ΔPcrp₅₂₇::TTaraCP_{BAD}crp δasdA27::TTaraCP_{BADc2} ΔaraE25 ΔaraBAD23 ΔrelA198::araCP_{BAD}lacITT ΔsopB1925 ΔagfBAC811 ΔfliC180 ΔfljB217) encoding pneumococcal antigen (pspA capsular gene) on plasmid pYA4088 is used in this example as illustration. However, any live attenuated bacterial vaccine strain can be used that carries one or more attenuating mutations of interest—including heterologous recombinant vaccine strains that express foreign antigens to elicit innate humoral and cellular immune responses. Moreover, Lennox broth is used for Salmonella strain culture in this example, any growth media and incubation conditions required to cultivate the strain of interest can be used. In addition, while the Rotating Wall Vessel bioreactor is used as the culture modality to achieve low sedimental shear stress, other culture environments that achieve this environment can also be used (including the spaceflight environment).

[0154] Live attenuated bacterial vaccine strain growth conditions. The attenuated Salmonella vaccine strain is first grown in Lennox broth (L-broth) as a static or aerated overnight culture at 37° C. Cultures are then inoculated at a dilution of 1:200 into 50 ml of L broth and subsequently introduced into the RWV bioreactor. Care is taken to ensure that the reactor is completely filled with culture media and no bubbles are present (i.e. zero headspace). The reactor vessel is oriented to grow cells under conditions of low sedimental shear or control sedimental shear. Two different RWV bioreactors, one in each physical orientation (low sedimental shear or control sedimental shear, respectively), should be simultaneously inoculated with the bacterial strain. Incubations in the RWV are at 37° C. or room temperature with a rotation rate of 25 rpm. Culture times are for 10 hours (which corresponds to mid-log phase growth) or 24 hours (which corresponds to stationary phase). Cell density is measured as viable bacterial counts plated on L agar for colony forming units per ml (CFU/ml). This is done to ensure that low sedimental shear and control sedimental shear-grown Salmonella are in the same phase of growth for use in subsequent experiments.

[0155] Modulations in low shear sedimental culture conditions. Bacterial strains can be grown under the identical conditions above with the exception that the manipulations of the low sedimental shear environments are made within physiological ranges encountered by pathogens in the mammalian host. This can be done by the inclusion of inert beads of different sizes in the RWV bioreactor during cell culture, but other approaches are also possible.

[0156] Oral immunization of mice with attenuated Salmonella vaccine strains and protection against challenge with a virulent wild-type strain. Protective immunity elicited by attenuated Salmonella strains cultured under low shear sedimental and control shear sedimental conditions will determined in BALB/c mice following peroral (p.o.) inoculation. Six-to-ten-week-old female BALB/c mice (Charles River Laboratories, Wilmington, Mass.) will be immunized by peroral (p.o.) administration of serial dilutions of a low sedimental shear or control sedimental shear grown attenuated Salmonella vaccine strain. While this example focuses on oral infection of mice, other immunization methods can also be used, including peroral, intraperitoneal, nasal, vaginal administration, among others. Likewise, other hosts can be used for infection, including but not limited to, other animals, animal analogues, plants, insects, nematodes, and cell and tissue cultures from animals, animal analogues and plants. In addition, infections can be administered while both the host and pathogen are simultaneously in a low shear sedimental environment, including spaceflight. Mice are housed in autoclavable micro-isolator cages with free access to standard laboratory food and water for one week before use to allow acclimation. Bacteria for use in these studies are grown in the RWV under the conditions described above, harvested from the bioreactor by dispensing into a 50 ml polypropylene conical tube, and immediately harvested by centrifugation at room temperature for 10 minutes at 7,974×g. Bacteria are immediately resuspended in 1.0 ml buffered saline with gelatin (BSG).

[0157] Specifically, mice to be used in p.o. immunization with attenuated live vaccine strains or inoculation with challenge strains are deprived of food and water for 4-6 h. An attenuated Salmonella vaccine strain is grown simultaneously in the RWV bioreactors in the low shear sedimental conditions and control shear sedimental conditions and harvested as described above. Appropriate dilutions of the bacteria (low shear sedimental or control shear sedimental) will be prepared for p.o. inoculation of mice. Results will be obtained from ten mice/inoculum dose. Specifically, ten mice per group will be perorally inoculated with 10⁶, 10⁷, 10⁸, and 10⁹ CFU of the attenuated Salmonella vaccine strain grown under low shear sedimental or control shear sedimental conditions, respectively. Challenge with fully virulent wild-type Salmonella is given orally 30 days after immunization and mice are observed for four weeks thereafter. (Other routes of challenge may also be used). (In the case of recombinant attenuated Salmonella vaccine strain encoding heterologous antigen against another pathogen, challenge will also be with the fully virulent pathogen for which Salmonella carries the heterologous antigen. For example, for the recombinant attenuated Salmonella anti-pneumococcal vaccine strain, challenge would be with fully virulent Streptococcus pneumoniae.) Following challenge, mice will be monitored for signs of disease at least twice daily. These include a hunched posture, scruffy coat, and unwillingness to open eyes or move around. Mortality of the mice will be observed for 30 days. The median lethal dose will be determined by the method of Reed and Muench.

[0158] Enumeration of bacteria in mouse tissues. The effect of low sedimental shear on the tissue distribution and persistence of Salmonella in mice will be assessed in vivo by peroral inoculation into six-to-ten-week-old female BALB/c mice. Bacteria are grown and harvested as described above. Quantitation of viable Salmonella in tissues and organs will be performed as described previously from two groups of five mice each in two independent trials. The mice will be euthanized by CO₂ asphyxiation at 3, 5, and 7 days postinfection for subsequent harvesting of tissues and enumeration of bacteria to determine colonization of Salmonella. Thereafter, to determine persistence of Salmonella in mice, tissues will be harvested from mice weekly through through 60 days. Fecal pellets will also be collected to monitor shedding of Salmonella throughout the entire duration of the study. The number of Salmonella present in the tissues will be determined by viable counting of serial dilutions of the homogenates on MacConkey agar (Difco, Detroit, Mich.) supplemented with lactose at 1% final concentration. Murine tissues that will be analyzed include Peyer's patches, intestinal epithelium (minus Peyer's patches), liver, spleen and mesenteric lymph nodes.

[0159] Measurement and duration of antibody responses by ELISA following infection of animals with live attenuated recombinant bacterial vaccine strains carrying heterologous antigens. Groups of eight mice each will be immunized orally with different doses of a live attenuated Salmonella recombinant vaccine strain carrying a foreign antigen of interest and grown and harvested as described above. The live attenuated recombinant S. typhimurium vaccine strain used for the teaching the claims in this application express the pneumococcal PspA capsular antigen, however, any antigen(s) from any pathogen of interest could be used in these studies. Animal immunizations will be carried out perorally as described above. Booster immunizations may be given to enhance antibody responses to the foreign antigen. Serum samples (retroorbital puncture) and vaginal washings will be collected 2, 4, 6, and 8 weeks after immunization as described previously. Humoral, mucosal and cellular immune responses can be measured against Salmonella and/or to the heterologous antigen that it encodes.

[0160] The levels of antibodies present in mouse sera against the pneumococcal PspA capsular antigen and S. typhimurium LPS will be determined using enzyme-linked immunosorbent assay (ELISA) as follows. Ninety-six well Immulon plates (Dynatech, Chantilly, Va.) will be coated with 10 μg of a recombinant pneumococcal PspA capsular surface protein (rPspA) in 0.2 M bicarbonate/carbonate buffer (pH 9.6) at 4° C. overnight. Nonspecific binding sites will be blocked with 1% BSA in phosphate buffered saline (PBS)+0.1% Tween20 (pH 7.4) (blocking buffer) at room temperature for 1 h. Serum samples and vaginal washings will be diluted 1:100 and 1:10, respectively, in blocking buffer. One hundred microliters of the diluted samples will be added in duplicate to the plates and incubated at 37° C. for 2 h. The plates are then washed with PBS+0.1% Tween20 three times. One hundred microliters of biotin-labeled goat anti-mouse IgA or IgG will be added, respectively, and incubated at 4° C. overnight. Alkaline phosphatase-labeled ExtrAvidin (Sigma, St. Louis, Mo.) is added to the plates and incubated at room temperature for 1 h. Substrate solution (0.1 ml) containing p-nitro-phenylphosphate (1 mg/ml) in 0.1 M diethanolamine buffer (pH 9.8) will be added and the optical density of the resulting substrate reaction is read at 405 nm with an automated ELISA reader (BioTech, Burlington, Vt.).

[0161] Measurement of central memory T cells following infection of animals with live attenuated recombinant bacterial vaccine strains carrying heterologous antigens. The induction of memory responses is critical for the long-term protective efficacy of vaccines. In particular, the CD4+ CD44_{high} CD62L_{high} and CD8315 +CD44_{high}CD62L_{high} central memory T cells play a central role in the recall response (Krishnan, L., K. Gurnani, C. J. Dicaire, H. van Faassen, A. Zafer, C. J. Kirschning, S. Sad, and G. D. Sprott. 2007. Rapid clonal expansion and prolonged maintenance of memory CD8+ T Cells of the effector (CD44_{high}CD62L_{low}) and central (CD44_{high}CD62L_{high} phenotype by an archaeosome adjuvant independent of TLR2. J. Immunol. 178:2396-2406). Thus, the effect of low sedimental shear cultivation of the vaccine strain on stimulation of a memory T cell response will be evaluated. Eight weeks after immunization, spleens will be isolated from mice and compared to control (unimmunized and mock infected) mice. Splenic cells will be stimulated with antigen (rPspA) and then examined by FACS analysis for T cell markers indicative of memory cells.

[0162] Measurement of innate immune responses/cytokines following infection of animals with live attenuated recombinant bacterial vaccine strains carrying heterologous antigens. Six weeks after immunization, sera from immunized and control mice will be subjected to Bio-Plex Protein Array System (Bio-Rad, Hercules, Calif.) or ELISPOT analysis to determine antigen stimulation of cytokine production as described previously (Li Y, Wang S, Xin W, Scarpellini G, Shi Z, Gunn B, Roland K L, Curtiss R III. A sopB Deletion Mutation Enhances the Immunogenicity and Protective Efficacy of a Heterologous Antigen Delivered by Live Attenuated Salmonella enterica Vaccines. Infect Immun. 2008 Sep. 2. Epub ahead of print). The cytokine secretion profiles from splenic lymphocytes will be compared (other tissues may also be utilized). Both Th1 and Th2 cytokines will be profiled. Briefly, samples will be incubated with antibody-coupled beads for 1 h with shaking. Beads will be washed 3× with wash buffer to remove unbound protein and subsequently incubated with biotinylated detection cytokine-specific antibody for 1 h with shaking. The beads will then be washed once more followed by incubation for 10 min with streptavidin-phycoerythrin. After this incubation, beads will be washed and resuspended in assay buffer, and the contents of each well will be subjected to the flow-based Bio-Plex Suspension Array System, which identifies each different color bead as a population of protein and quantifies each protein target based on secondary antibody fluorescence. Cytokine concentrations will be calculated by Bio-Plex Manager software using a standard curve derived from a recombinant cytokine standard.

[0163] Immunoblotting for detection and quantiation of heterologous antigens carried by attenuated Salmonella vaccine strains from serum of infected animals. For immunoblotting, the S. typhimurium recombinant attenuated strain x9558 that carries the pneumococcal capsular antigen on plasmid pYA4088 will be grown with aeration overnight at 37° C. Five hundred microliters of each culture will be pelleted and resuspended in 2× sample loading buffer and boiled for 5 min. Protein preparations will be separated by sodium dodecyl sulfate (SDS)-polyacrylamide gel electrophoresis (PAGE) (12.5% polyacrylamide) and prepared for Coomassie brilliant blue staining or Western blot analysis. In addition to heterologous antigen detection, detection of Salmonella antigens can also be performed using Salmonella outer membrane protein antigens or LPS.

### Example 4

[0164] This example describes the stress response phenotypes observed for a recombinant attenuated Salmonella anti-pneumococcal vaccine strain, X9558 pYA4088 (Δpmi-2426 Δ(gmd-fcl)-26 ΔPfur₃₃::TTaraCP_{BAD}fur ΔPcrp₅₂₇::TTaraCP_{BAD}crp ΔasdA27::TTaraCP_{BADc2} ΔaraE25 ΔaraBAD23 ΔrelA198::araCP_{BAD}lacITT ΔsopB1925 ΔagfBAC811 ΔfliC180 ΔfljB217) during low fluid shear culture in the RWV bioreactor. The results indicate that low fluid shear culture in the RWV confers increased protection to the strain to survive virulence-related stress responses, including an increased ability to survive acid stress, thermal stress, and oxidative stress. In addition, low fluid shear culture of this strain decreased its biofilm formation. These low fluid shear-conferred phenotypes are all important features that could significantly enhance the immunogenicity and protection of this vaccine strain.

### Biofilm Formation

[0165] Differences in the O.D. readings before and after the RWVs were stopped:

| | O.D. before | O.D. after stopping | Duration of |
|---|---|---|---|
| | stopping HARV | HARV | experiment |
| 1XG | 0.495 | 0.923 | 25 hours 25 min |
| LSMMG | 1.376 | 1.462 | |

[0166] There is a marked difference in the O.D. reading for the 1×G condition before and after the RWV was stopped. This difference in OD was due to the enhanced biofilm formation in the 1×g condition as compared to the LSMMG condition, and not differences in cell numbers—as the cells were in the same phase of growth under the two conditions, however, most of the cells were sessile (attached to the membrane) in the 1×g RWV, leaving fewer cells in the supernatant (planktonic cells) for cell counting. When the RWVs were taken apart, a biofilm like substance was observed on the membrane with the 1×G culture. No such biofilm formation was observed for the LSMMG cultures. FIG. 9 presents microscopic images of cells scraped off of the membranes and stained with crystal violet.

### Thermal Stress Assay Data:

| | Time (min) | | |
|---|---|---|---|
| | 30 | 60 | 90 |
| LSMMG (37° C.) | 3.10E+08 | 2.67E+08 | 3.18E+08 |
| 1XG (37° C.) | 3.00E+08 | 3.35E+08 | 2.70E+08 |
| LSMMG (55° C.) | 3.80E+06 | 2.70E+05 | 0.00E+00 |
| 1XG (55° C.) | 7.60E+05 | 8.30E+04 | 0.00E+00 |

[0168] The data show that the cells can withstand thermal stress in the LSMMG condition much better as compared to the 1×G condition at 55° C.

### Acid Stress Assay Data:

[0169] In this experiment, LSMMG and 1×g cultures were subjected to acid stress and assayed for resistance to pH 3.5 (by addition of an amount of concentrated citrate buffer that has been previously determined to give this pH value) as described previously (Nickerson et al., Infection and Immunity, 2000; Wilson et al, Applied and Environmental Microbiology, 2002). The pH level during the assay was monitored using pH strips, and then confirmed with a pH electrode at the end of the assay. The percentage of surviving bacteria present after 30, 45, 60 and 90 minutes of acid stress (compared to the original number of bacteria before addition of the stress) was calculated via serial dilution and CFU plating. These results were compared identical control cultures that were not subjected to acid stress (no citrate buffer was added), but instead were allowed to sit on the bench top statically and at time points 30, 60 and 90 minutes about 100 ul were taken out and added to 9.9 ml of PBS. It can be seen that the LSMMG cells survive acid stress better than 1×G grown cells

| | Time (min) | | | | |
|---|---|---|---|---|---|
| | 0 | 30 | 45 | 60 | 90 |
| 1XG | 2.72E+06 | 2.66E+06 | | 2.72E+06 | 3.35E+06 |
| (Contro [symbol] | | | | | |
| LSMMG | 3.80E+06 | 3.37E+06 | | 3.66E+06 | 3.66E+06 |
| (Co [symbol] | | | | | |
| 1XG | 2.72E+06 | 2.07E+06 | 2.18E+06 | 2.27E+06 | 2.60E+06 |
| LSMMG | 3.80E+06 | 2.90E+06 | 3.26E+06 | 3.47E+06 | 2.82E+06 |

[symbol]

indicates data missing or illegible when filed

### Oxidative Stress Data:

[0170] In a separate experiment, oxidative stress (in the form of hydrogen peroxide) was applied to cells.

| | Time (min) | | | | |
|---|---|---|---|---|---|
| | 0 | 30 | 60 | 90 | 120 |
| 1XG | 6.13E+06 | 6.67E+06 | 6.72E+06 | 5.89E+06 | 7.10E+06 |
| (Contro [symbol] | | | | | |
| LSMMG | 6.30E+06 | 6.65E+06 | 6.19E+06 | 5.67E+06 | 6.49E+06 |
| (Co [symbol] | | | | | |
| 1XG | 6.13E+06 | 2.29E+04 | 0.00E+00 | 0.00E+00 | 0.00E+00 |
| LSMMG | 6.30E+06 | 1.43E+06 | 3.90E+05 | 2.10E+05 | 2.10E+05 |

[symbol]

indicates data missing or illegible when filed

[0171] It can be seen that the LSMMG cells survive the oxidative stress much better than the 1×G grown cells after 30 min.

[0172] The above results were obtained using the recombinant attenuated Salmonella anti-pneumococcal vaccine strain X9558 that carries the pneumococcal capsular antigen on plasmid pYA4088. The S. typhimurium UK-1 wild-type parent strain showed similar results.

### Example 5

### Spaceflight Alters Expression of Genes in the Hfq Regulon in Pseudomonas aeruginosa

[0173] Cultures of P. aeruginosa flew in the same flight experiment with S. typhimurium aboard STS-115 to determine changes in gene expression compared to otherwise identical ground controls. Preliminary results from microarray analysis indicate that of the 226 P. aeruginosa genes that were differentially regulated during spaceflight, 59 (˜23%) are regulated by Hfq—including those encoding ribosomal proteins, iron metabolic pathways, carbon metabolic pathways, cytoplasmic and periplasmic sigma factors, and ion response pathways. See Tables 7 and 8. In addition, it has been shown that LSMMG-cultured P. aeruginosa demonstrated an increased sensitivity to acid stress as compared to the control orientation. Collectively, these data supports an association between the gene expression and phenotypic response of P. aeruginosa during flight and LSMMG culture and the Hfq regulon.

### Example 6

### Spaceflight May Alter the Virulence Potential of Candida albicans

[0174] Scanning electron microscopy (SEM) (FIG. 10) shows profound hyphal formation of C. albicans during spaceflight culture—but no hyphal formation is evident during ground culture of identical controls. Hyphal formation is known to be associated with increased virulence.

### Example 7

### Phosphate Ion Modulates the LSMMG Response of the Gram Positive Pathogen, Staphylococcus aureus

[0175] Initial studies were performed on S. aureus N315 to determine phenotypic responses to culture in LSMMG and 1×G. When grown in LSMMG, S. aureus displayed a distinct decrease in the golden carotenoid pigmentation compared to growth in the control orientation, based upon a colorimetric assay for the primary carotenoid, staphyloxanthin. Notably, the addition of phosphate ion (25 mM Na₂HPO₄₎ to the media increased both the pigmentation of the LSSMG and 1×G control cultures. This latter finding is in agreement with the finding described above that environmental ions modulate the LSMMG acid stress response in Salmonella.

TABLE 7

| | | sig- | sig- | sig- | sig- | | | | |
|---|---|---|---|---|---|---|---|---|---|
| | | T- | T- | Mann- | Mann- | | | | |
| | % P | Test | Test | Whitney | Whitney | | sig log | sig log | sig log |
| | ground- | P | Change | P | Change | % MD/D- | ratio- | ratio- | ratio- |
| | Percent | Value | Direction | Value | Direction | Percent | Average | Median | Stdev |
| PA4243_secY_at (SEQ ID No: 639) | 100 | 0.262 | None | 0.05 | Down | 100 | −4.3 | −4.56 | 1.38 |
| PA4242_rpmJ_at (SEQ ID No: 640) | 100 | 0.206 | None | 0.05 | Down | 100 | −4.63 | −4.55 | 1.23 |
| PA5049_rpmE_at (SEQ ID No: 641) | 100 | 0.304 | None | 0.05 | Down | 88 | −4.14 | −4.54 | 1.39 |
| PA3745_rpsP_at (SEQ ID No: 642) | 100 | 0.275 | None | 0.05 | Down | 100 | −4.43 | −4.52 | 1.32 |
| PA3744_rimM_at (SEQ ID No: 643) | 100 | 0.261 | None | 0.05 | Down | 100 | −4.27 | −4.5 | 1.32 |
| PA4568_rplU_at (SEQ ID No: 644) | 100 | 0.256 | None | 0.05 | Down | 100 | −4.55 | −4.47 | 1.25 |
| PA2966_acpP_at (SEQ ID No: 645) | 100 | 0.213 | None | 0.05 | Down | 100 | −4.21 | −4.46 | 0.93 |
| PA0492_at (SEQ ID No: 646) | 100 | 0.045 | Down | 0.05 | Down | 100 | −4.29 | −4.43 | 0.78 |
| PA4563_rpsT_at (SEQ ID No: 647) | 100 | 0.186 | None | 0.05 | Down | 100 | −4.67 | −4.43 | 1.31 |
| PA4245_rpmD_at (SEQ ID No: 648) | 100 | 0.241 | None | 0.05 | Down | 100 | −4.12 | −4.42 | 1.16 |
| PA3656_rpsB_at (SEQ ID No: 649) | 100 | 0.233 | None | 0.05 | Down | 100 | −4.09 | −4.4 | 1.14 |
| PA2971_at (SEQ ID No: 650) | 100 | 0.331 | None | 0.05 | Down | 66 | −4.03 | −4.39 | 1.3 |
| PA4433_rplM_at (SEQ ID No: 651) | 100 | 0.228 | None | 0.05 | Down | 100 | −4.62 | −4.38 | 1.16 |
| PA5570_rpmH_at (SEQ ID No: 652) | 100 | 0.234 | None | 0.05 | Down | 66 | −4.58 | −4.37 | 1.03 |
| PA4240_rpsK_at (SEQ ID No: 653) | 100 | 0.26 | None | 0.05 | Down | 77 | −4.07 | −4.37 | 1.1 |
| PA4239_rpsD_at (SEQ ID No: 654) | 100 | 0.201 | None | 0.05 | Down | 100 | −4.29 | −4.37 | 0.99 |
| PA4262_rplD_at (SEQ ID No: 655) | 100 | 0.278 | None | 0.05 | Down | 100 | −4.04 | −4.25 | 1.1 |
| PA4268_rpsL_at (SEQ ID No: 656) | 100 | 0.278 | None | 0.05 | Down | 100 | −4.38 | −4.24 | 1.27 |
| PA4247_rplR_at (SEQ ID No: 657) | 100 | 0.232 | None | 0.05 | Down | 100 | −4.14 | −4.24 | 1 |
| PA4263_rplC_at (SEQ ID No: 658) | 100 | 0.261 | None | 0.05 | Down | 100 | −4.02 | −4.22 | 1.18 |
| PA3162_rpsA_at (SEQ ID No: 659) | 100 | 0.257 | None | 0.05 | Down | 77 | −3.94 | −4.17 | 0.99 |
| PA5316_rpmB_at (SEQ ID No: 660) | 100 | 0.271 | None | 0.05 | Down | 100 | −4.3 | −4.17 | 1.21 |
| Pae_tRNA_Gln_s_at (SEQ ID No: 661) | 100 | 0.331 | None | 0.05 | Down | 88 | −4.25 | −4.14 | 1.56 |
| PA4671_at (SEQ ID No: 662) | 100 | 0.196 | None | 0.05 | Down | 88 | −3.88 | −4.14 | 0.94 |
| PA4272_rplJ_at (SEQ ID No: 663) | 100 | 0.256 | None | 0.05 | Down | 88 | −3.84 | −4.14 | 0.97 |
| PA2619_infA_at (SEQ ID No: 664) | 100 | 0.175 | None | 0.05 | Down | 100 | −4.31 | −4.13 | 1.17 |
| PA4241_rpsM_at (SEQ ID No: 665) | 100 | 0.237 | None | 0.05 | Down | 88 | −3.87 | −4.12 | 1.11 |
| PA4482_gatC_at (SEQ ID No: 666) | 100 | 0.285 | None | 0.05 | Down | 77 | −4.01 | −4.11 | 0.84 |
| PA2743_infC_at (SEQ ID No: 667) | 100 | 0.326 | None | 0.05 | Down | 66 | −3.92 | −4.1 | 1.1 |
| PA3742_rplS_at (SEQ ID No: 668) | 100 | 0.263 | None | 0.05 | Down | 66 | −3.74 | −4.1 | 0.89 |
| PA5491_at (SEQ ID No: 669) | 100 | 0.248 | None | 0.05 | Down | 88 | −3.97 | −4.1 | 1.21 |
| PA4238_rpoA_at (SEQ ID No: 670) | 100 | 0.258 | None | 0.05 | Down | 88 | −3.74 | −4.1 | 0.99 |
| PA2321_at (SEQ ID No: 671) | 100 | 0.165 | None | 0.05 | Down | 100 | −4.16 | −4.1 | 1.04 |
| PA5276_lppL_i_at (SEQ ID No: 672) | 100 | 0.12 | None | 0.05 | Down | 55 | −4.05 | −4.09 | 0.98 |
| PA3743_trmD_at (SEQ ID No: 673) | 100 | 0.301 | None | 0.05 | Down | 88 | −4.19 | −4.09 | 1.39 |
| PA2639_nuoD_at (SEQ ID No: 674) | 100 | 0.045 | Down | 0.05 | Down | 100 | −3.9 | −4.09 | 0.68 |
| PA1800_tig_at (SEQ ID No: 675) | 100 | 0.34 | None | 0.05 | Down | 100 | −3.79 | −4.06 | 1.05 |
| PA5555_atpG_at (SEQ ID No: 676) | 100 | 0.246 | None | 0.05 | Down | 66 | −3.82 | −4.04 | 1.02 |
| PA2970_rpmF_at (SEQ ID No: 677) | 100 | 0.258 | None | 0.05 | Down | 100 | −4.1 | −4.04 | 1.19 |
| PA1582_sdhD_at (SEQ ID No: 678) | 100 | 0.145 | None | 0.05 | Down | 100 | −3.83 | −4.04 | 1.01 |
| PA4246_rpsE_at (SEQ ID No: 679) | 100 | 0.185 | None | 0.05 | Down | 66 | −3.73 | −4.01 | 1.06 |
| PA0579_rpsU_at (SEQ ID No: 680) | 100 | 0.273 | None | 0.05 | Down | 77 | −4.25 | −4.01 | 1.23 |
| PA2634_at (SEQ ID No: 681) | 100 | 0.008 | Down | 0.05 | Down | 100 | −3.84 | −3.99 | 0.66 |
| PA1581_sdhC_at (SEQ ID No: 682) | 100 | 0.264 | None | 0.05 | Down | 88 | −3.91 | −3.98 | 0.97 |
| PA5557_atpH_at (SEQ ID No: 683) | 100 | 0.318 | None | 0.05 | Down | 55 | −3.67 | −3.97 | 0.97 |
| Pae_tRNA_Gly_s_at (SEQ ID No: 684) | 100 | 0.32 | None | 0.05 | Down | 66 | −4.48 | −3.97 | 1.63 |
| PA5298_at (SEQ ID No: 685) | 100 | 0.072 | None | 0.05 | Down | 77 | −3.74 | −3.97 | 1.06 |
| PA4846_aroQ1_at (SEQ ID No: 686) | 100 | 0.153 | None | 0.05 | Down | 88 | −4.04 | −3.93 | 0.87 |
| PA0493_at (SEQ ID No: 687) | 100 | 0.007 | Down | 0.05 | Down | 100 | −4.05 | −3.93 | 0.87 |
| PA3266_capB_at (SEQ ID No: 688) | 100 | 0.178 | None | 0.05 | Down | 66 | −4.01 | −3.91 | 1.16 |
| PA4267_rpsG_at (SEQ ID No: 689) | 100 | 0.229 | None | 0.05 | Down | 55 | −3.82 | −3.9 | 0.97 |
| PA4748_tpiA_at (SEQ ID No: 690) | 100 | 0.339 | None | 0.05 | Down | 55 | −3.72 | −3.9 | 1.26 |
| PA4847_accB_at (SEQ ID No: 691) | 100 | 0.165 | None | 0.05 | Down | 77 | −3.77 | −3.9 | 0.74 |
| Pae_tRNA_Val_f_at (SEQ ID No: 692) | 100 | 0.323 | None | 0.05 | Down | 66 | −3.8 | −3.88 | 1.25 |
| PA4249_rpsH_at (SEQ ID No: 693) | 100 | 0.286 | None | 0.05 | Down | 77 | −3.83 | −3.84 | 1.25 |
| PA0856_at (SEQ ID No: 694) | 100 | 0.041 | Down | 0.05 | Down | 100 | −3.71 | −3.84 | 0.77 |
| PA5569_rnpA_at (SEQ ID No: 695) | 100 | 0.282 | None | 0.05 | Down | 55 | −3.82 | −3.83 | 1.18 |
| PA0896_aruF_at (SEQ ID No: 696) | 100 | 0.047 | Down | 0.05 | Down | 77 | −3.99 | −3.83 | 1.32 |
| PA4430_at (SEQ ID No: 697) | 100 | 0.142 | None | 0.05 | Down | 77 | −3.9 | −3.81 | 0.86 |
| PA4935_rpsF_at (SEQ ID No: 698) | 100 | 0.305 | None | 0.05 | Down | 55 | −3.57 | −3.8 | 0.92 |
| PA4031_ppa_at (SEQ ID No: 699) | 100 | 0.146 | None | 0.05 | Down | 66 | −3.54 | −3.78 | 0.76 |
| PA2744_thrS_at (SEQ ID No: 700) | 100 | 0.239 | None | 0.05 | Down | 55 | −3.48 | −3.76 | 0.96 |
| PA4942_hflK_at (SEQ ID No: 701) | 100 | 0.245 | None | 0.05 | Down | 55 | −3.57 | −3.75 | 0.99 |
| PA1557_at (SEQ ID No: 702) | 100 | 0.073 | None | 0.05 | Down | 55 | −3.87 | −3.74 | 0.75 |
| PA4406_lpxC_at (SEQ ID No: 703) | 100 | 0.215 | None | 0.05 | Down | 66 | −3.62 | −3.74 | 0.95 |
| PA3621_fdxA_at (SEQ ID No: 704) | 100 | 0.157 | None | 0.05 | Down | 88 | −3.76 | −3.73 | 0.98 |
| PA3644_lpxA_at (SEQ ID No: 705) | 100 | 0.238 | None | 0.05 | Down | 88 | −3.63 | −3.73 | 1.06 |
| PA4053_ribE_at (SEQ ID No: 706) | 100 | 0.233 | None | 0.05 | Down | 88 | −3.57 | −3.73 | 0.83 |
| PA4276_secE_at (SEQ ID No: 707) | 100 | 0.334 | None | 0.05 | Down | 55 | −3.87 | −3.69 | 1.36 |
| PA3811_hscB_at (SEQ ID No: 708) | 100 | 0.281 | None | 0.05 | Down | 55 | −3.45 | −3.69 | 0.93 |
| PA3645_fabZ_at (SEQ ID No: 709) | 100 | 0.207 | None | 0.05 | Down | 66 | −3.6 | −3.69 | 0.99 |
| PA4431_at (SEQ ID No: 710) | 100 | 0.201 | None | 0.05 | Down | 77 | −3.51 | −3.69 | 0.8 |
| PA1156_nrdA_at (SEQ ID No: 711) | 100 | 0.137 | None | 0.05 | Down | 88 | −3.74 | −3.69 | 0.83 |
| PA4762_grpE_at (SEQ ID No: 712) | 100 | 0.289 | None | 0.05 | Down | 88 | −3.64 | −3.68 | 1.02 |
| PA3159_wbpA_at (SEQ ID No: 713) | 100 | 0.339 | None | 0.05 | Down | 55 | −3.49 | −3.67 | 0.88 |
| PA4944_at (SEQ ID No: 714) | 100 | 0.304 | None | 0.05 | Down | 66 | −3.54 | −3.66 | 0.97 |
| PA3636_kdsA_at (SEQ ID No: 715) | 100 | 0.125 | None | 0.05 | Down | 66 | −3.52 | −3.66 | 0.87 |
| PA4261_rplW_at (SEQ ID No: 716) | 100 | 0.29 | None | 0.05 | Down | 77 | −3.8 | −3.65 | 1.14 |
| PA4252_rplX_at (SEQ ID No: 717) | 100 | 0.003 | Down | 0.05 | Down | 100 | −3.95 | −3.65 | 1.08 |
| PA4745_nusA_at (SEQ ID No: 718) | 100 | 0.301 | None | 0.05 | Down | 55 | −3.38 | −3.62 | 0.97 |
| PA3635_eno_at (SEQ ID No: 719) | 100 | 0.269 | None | 0.05 | Down | 55 | −3.28 | −3.62 | 0.9 |
| PA0336_at (SEQ ID No: 720) | 100 | 0.289 | None | 0.05 | Down | 77 | −3.43 | −3.62 | 0.85 |
| ig_5207621_5208463_at | 100 | 0.202 | None | 0.05 | Down | 55 | −3.5 | −3.61 | 0.95 |
| (SEQ ID No: 721) | | | | | | | | | |
| PA5558_atpF_at (SEQ ID No: 722) | 100 | 0.304 | None | 0.05 | Down | 77 | −3.51 | −3.61 | 0.96 |
| PA2968_fabD_at (SEQ ID No: 723) | 100 | 0.202 | None | 0.05 | Down | 66 | −3.6 | −3.6 | 0.93 |
| PA3832_holC_at (SEQ ID No: 724) | 100 | 0.017 | Down | 0.05 | Down | 88 | −3.55 | −3.59 | 0.66 |
| PA4483_gatA_at (SEQ ID No: 725) | 100 | 0.153 | None | 0.05 | Down | 66 | −3.62 | −3.58 | 0.76 |
| PA2747_at (SEQ ID No: 726) | 100 | 0.085 | None | 0.05 | Down | 66 | −3.76 | −3.57 | 0.82 |
| Pae_tRNA_His_f_at (SEQ ID No: 727) | 100 | 0.184 | None | 0.05 | Down | 66 | −3.66 | −3.57 | 1.04 |
| PA2624_idh_at (SEQ ID No: 728) | 100 | 0.177 | None | 0.05 | Down | 77 | −3.32 | −3.57 | 0.67 |
| PA2453_at (SEQ ID No: 729) | 100 | 0.23 | None | 0.05 | Down | 88 | −3.52 | −3.56 | 0.82 |
| PA4258_rplV_at (SEQ ID No: 730) | 100 | 0.3 | None | 0.05 | Down | 55 | −3.57 | −3.55 | 0.99 |
| PA4743_rbfA_at (SEQ ID No: 731) | 100 | 0.229 | None | 0.05 | Down | 55 | −3.52 | −3.55 | 1.06 |
| PA1533_at (SEQ ID No: 732) | 100 | 0.147 | None | 0.05 | Down | 77 | −3.69 | −3.54 | 0.94 |
| PA1123_at (SEQ ID No: 733) | 100 | 0.004 | Down | 0.05 | Down | 88 | −3.49 | −3.54 | 0.72 |
| PA5490_cc4_at (SEQ ID No: 734) | 100 | 0.114 | None | 0.05 | Down | 88 | −3.59 | −3.54 | 0.8 |
| PA3001_at (SEQ ID No: 735) | 100 | 0.078 | None | 0.05 | Down | 100 | −3.74 | −3.54 | 0.87 |
| PA1013_purC_at (SEQ ID No: 736) | 100 | 0.199 | None | 0.05 | Down | 88 | −3.35 | −3.53 | 0.6 |
| PA3987_leuS_at (SEQ ID No: 737) | 100 | 0.079 | None | 0.05 | Down | 55 | −3.59 | −3.52 | 1.14 |
| PA4761_dnaK_at (SEQ ID No: 738) | 100 | 0.152 | None | 0.05 | Down | 66 | −3.46 | −3.52 | 0.8 |
| PA3701_prfB_at (SEQ ID No: 739) | 100 | 0.117 | None | 0.05 | Down | 66 | −3.42 | −3.51 | 0.72 |
| PA5128_secB_at (SEQ ID No: 740) | 100 | 0.054 | None | 0.05 | Down | 100 | −3.66 | −3.51 | 0.71 |
| PA4253_rplN_at (SEQ ID No: 741) | 100 | 0.255 | None | 0.05 | Down | 66 | −3.57 | −3.5 | 0.97 |
| PA4386_groES_at (SEQ ID No: 742) | 100 | 0.228 | None | 0.05 | Down | 77 | −3.65 | −3.5 | 0.94 |
| PA5067_hisE_at (SEQ ID No: 743) | 100 | 0.148 | None | 0.05 | Down | 77 | −3.31 | −3.5 | 0.77 |
| PA4880_at (SEQ ID No: 744) | 100 | 0.1 | None | 0.05 | Down | 88 | −3.49 | −3.5 | 0.94 |
| PA1610_fabA_at (SEQ ID No: 745) | 100 | 0.118 | None | 0.05 | Down | 100 | −3.77 | −3.5 | 1 |
| PA3807_ndk_at (SEQ ID No: 746) | 100 | 0.279 | None | 0.05 | Down | 66 | −3.56 | −3.49 | 0.95 |
| PA4266_fusA1_at (SEQ ID No: 747) | 100 | 0.284 | None | 0.05 | Down | 77 | −3.69 | −3.48 | 1.05 |
| PA0972_tolB_at (SEQ ID No: 748) | 100 | 0.198 | None | 0.05 | Down | 66 | −3.52 | −3.47 | 0.95 |
| PA4232_ssb_at (SEQ ID No: 749) | 100 | 0.114 | None | 0.05 | Down | 88 | −3.46 | −3.47 | 0.75 |
| PA3700_lysS_at (SEQ ID No: 750) | 100 | 0.251 | None | 0.05 | Down | 55 | −3.5 | −3.45 | 0.9 |
| PA4460_at (SEQ ID No: 751) | 100 | 0.147 | None | 0.05 | Down | 66 | −3.42 | −3.45 | 0.88 |
| PA5069_tatB_at (SEQ ID No: 752) | 100 | 0.233 | None | 0.05 | Down | 66 | −3.65 | −3.44 | 0.94 |
| PA4853_fis_at (SEQ ID No: 753) | 100 | 0.188 | None | 0.05 | Down | 66 | −3.37 | −3.44 | 0.9 |
| PA0019_def_at (SEQ ID No: 754) | 100 | 0.037 | Down | 0.05 | Down | 77 | −3.43 | −3.44 | 0.57 |
| PA0595_ostA_at (SEQ ID No: 755) | 100 | 0.182 | None | 0.05 | Down | 55 | −3.42 | −3.43 | 0.98 |
| PA4848_accC_at (SEQ ID No: 756) | 100 | 0.109 | None | 0.05 | Down | 77 | −3.57 | −3.43 | 0.88 |
| PA1580_gltA_at (SEQ ID No: 757) | 100 | 0.162 | None | 0.05 | Down | 77 | −3.38 | −3.43 | 0.8 |
| PA4259_rpsS_at (SEQ ID No: 758) | 100 | 0.152 | None | 0.05 | Down | 55 | −3.74 | −3.41 | 0.92 |
| PA2976_rne_at (SEQ ID No: 759) | 100 | 0.096 | None | 0.05 | Down | 66 | −3.44 | −3.41 | 0.74 |
| PA1574_at (SEQ ID No: 760) | 100 | 0.015 | Down | 0.05 | Down | 77 | −3.47 | −3.41 | 1.07 |
| PA2023_galU_at (SEQ ID No: 761) | 100 | 0.029 | Down | 0.05 | Down | 77 | −3.46 | −3.41 | 0.64 |
| PA4740_pnp_at (SEQ ID No: 762) | 100 | 0.194 | None | 0.05 | Down | 77 | −3.45 | −3.4 | 0.74 |
| PA3907_at (SEQ ID No: 763) | 100 | 0.158 | None | 0.05 | Down | 55 | −3.26 | −3.39 | 0.72 |
| PA2960_pilZ_at (SEQ ID No: 764) | 100 | 0.079 | None | 0.05 | Down | 66 | −3.48 | −3.38 | 0.84 |
| PA4425_at (SEQ ID No: 765) | 100 | 0.111 | None | 0.05 | Down | 55 | −3.46 | −3.37 | 0.82 |
| PA5068_tatA_at (SEQ ID No: 766) | 100 | 0.159 | None | 0.05 | Down | 55 | −3.37 | −3.37 | 0.76 |
| PA3686_adk_at (SEQ ID No: 767) | 100 | 0.177 | None | 0.05 | Down | 88 | −3.73 | −3.37 | 0.88 |
| PA4759_dapB_at (SEQ ID No: 768) | 100 | 0.043 | Down | 0.05 | Down | 77 | −3.38 | −3.36 | 0.83 |
| PA4292_at (SEQ ID No: 769) | 100 | 0.155 | None | 0.05 | Down | 77 | −3.41 | −3.36 | 0.94 |
| PA1552_at (SEQ ID No: 770) | 100 | 0.024 | Down | 0.05 | Down | 88 | −3.55 | −3.36 | 0.87 |
| PA5143_hisB_at (SEQ ID No: 771) | 100 | 0.03 | Down | 0.05 | Down | 66 | −3.4 | −3.35 | 0.78 |
| PA3014_faoA_at (SEQ ID No: 772) | 100 | 0.104 | None | 0.05 | Down | 66 | −3.34 | −3.35 | 0.73 |
| PA1505_moaA2_at (SEQ ID No: 773) | 100 | 0.082 | None | 0.05 | Down | 66 | −3.3 | −3.34 | 0.87 |
| PA3981_at (SEQ ID No: 774) | 100 | 0.038 | Down | 0.05 | Down | 77 | −3.51 | −3.34 | 0.91 |
| PA2965_fabF1_at (SEQ ID No: 775) | 100 | 0.265 | None | 0.05 | Down | 55 | −3.33 | −3.3 | 0.92 |
| PA0857_bolA_at (SEQ ID No: 776) | 100 | 0.103 | None | 0.05 | Down | 66 | −3.36 | −3.3 | 0.75 |
| PA5315_rpmG_at (SEQ ID No: 777) | 100 | 0.052 | None | 0.05 | Down | 77 | −3.47 | −3.3 | 0.87 |
| PA3861_rhlB_at (SEQ ID No: 778) | 100 | 0.059 | None | 0.05 | Down | 66 | −3.32 | −3.28 | 0.85 |
| Pae_tRNA_Asn_s_at (SEQ ID No: 779) | 100 | 0.081 | None | 0.05 | Down | 55 | −3.28 | −3.27 | 0.79 |
| PA3575_at (SEQ ID No: 780) | 100 | 0.092 | None | 0.05 | Down | 88 | −3.48 | −3.27 | 0.88 |
| PA1774_at (SEQ ID No: 781) | 100 | 0.167 | None | 0.05 | Down | 55 | −3.21 | −3.26 | 0.73 |
| PA4333_at (SEQ ID No: 782) | 100 | 0.248 | None | 0.05 | Down | 66 | −3.26 | −3.25 | 0.91 |
| PA2667_at (SEQ ID No: 783) | 100 | 0.115 | None | 0.05 | Down | 66 | −3.24 | −3.24 | 0.65 |
| PA2979_kdsB_at (SEQ ID No: 784) | 100 | 0.065 | None | 0.05 | Down | 55 | −3.36 | −3.23 | 0.87 |
| PA4006_at (SEQ ID No: 785) | 100 | 0.184 | None | 0.05 | Down | 66 | −3.48 | −3.23 | 1.07 |
| PA1008_bcp_at (SEQ ID No: 786) | 100 | 0.032 | Down | 0.05 | Down | 66 | −3.26 | −3.22 | 0.72 |
| PA4271_rplL_at (SEQ ID No: 787) | 100 | 0.271 | None | 0.05 | Down | 66 | −3.55 | −3.22 | 1.02 |
| PA3480_at (SEQ ID No: 788) | 100 | 0.124 | None | 0.05 | Down | 77 | −3.49 | −3.22 | 1.04 |
| PA4503_at (SEQ ID No: 789) | 100 | 0.178 | None | 0.05 | Down | 77 | −3.25 | −3.22 | 0.72 |
| PA5119_glnA_at (SEQ ID No: 790) | 100 | 0.071 | None | 0.05 | Down | 88 | −3.32 | −3.22 | 0.68 |
| PA5054_hslU_at (SEQ ID No: 791) | 100 | 0.088 | None | 0.05 | Down | 100 | −3.5 | −3.22 | 0.83 |
| PA2950_at (SEQ ID No: 792) | 100 | 0.159 | None | 0.05 | Down | 55 | −3.2 | −3.21 | 0.65 |
| PA1609_fabB_at (SEQ ID No: 793) | 100 | 0.054 | None | 0.05 | Down | 77 | −3.23 | −3.2 | 0.55 |
| PA3637_pyrG_at (SEQ ID No: 794) | 100 | 0.147 | None | 0.05 | Down | 88 | −3.52 | −3.2 | 0.86 |
| PA5429_aspA_at (SEQ ID No: 795) | 100 | 0.058 | None | 0.05 | Down | 77 | −3.44 | −3.19 | 0.72 |
| PA5322_algC_at (SEQ ID No: 796) | 100 | 0.084 | None | 0.05 | Down | 100 | −3.5 | −3.19 | 0.63 |
| PA0429_at (SEQ ID No: 797) | 100 | 0.148 | None | 0.05 | Down | 66 | −3.49 | −3.18 | 1.03 |
| PA3369_at (SEQ ID No: 798) | 100 | 0.079 | None | 0.05 | Down | 77 | −3.3 | −3.18 | 0.74 |
| PA4559_lspA_at (SEQ ID No: 799) | 100 | 0.279 | None | 0.05 | Down | 55 | −3.28 | −3.17 | 0.8 |
| PA1659_at (SEQ ID No: 800) | 100 | 0.064 | None | 0.05 | Down | 77 | −3.26 | −3.17 | 0.56 |
| PA0357_mutM_at (SEQ ID No: 801) | 100 | 0.078 | None | 0.05 | Down | 55 | −3.26 | −3.16 | 0.72 |
| PA5063_ubiE_at (SEQ ID No: 802) | 100 | 0.024 | Down | 0.05 | Down | 100 | −3.25 | −3.16 | 0.74 |
| PA0555_fda_at (SEQ ID No: 803) | 100 | 0.094 | None | 0.05 | Down | 77 | −3.21 | −3.13 | 0.72 |
| PA3440_at (SEQ ID No: 804) | 100 | 0.121 | None | 0.05 | Down | 88 | −3.38 | −3.13 | 0.91 |
| PA1009_at (SEQ ID No: 805) | 100 | 0.077 | None | 0.05 | Down | 55 | −3.14 | −3.12 | 0.76 |
| PA1010_dapA_at (SEQ ID No: 806) | 100 | 0.114 | None | 0.05 | Down | 66 | −3.41 | −3.12 | 0.7 |
| PA3626_at (SEQ ID No: 807) | 100 | 0.094 | None | 0.05 | Down | 55 | −3.16 | −3.1 | 0.66 |
| PA1462_at (SEQ ID No: 808) | 100 | 0.131 | None | 0.05 | Down | 77 | −3.23 | −3.1 | 0.75 |
| PA4264_rpsJ_at (SEQ ID No: 809) | 100 | 0.301 | None | 0.05 | Down | 55 | −3.69 | −3.09 | 1.31 |
| PA5078_at (SEQ ID No: 810) | 100 | 0.081 | None | 0.05 | Down | 100 | −3.34 | −3.09 | 0.78 |
| PA0766_mucD_at (SEQ ID No: 811) | 100 | 0.1 | None | 0.05 | Down | 66 | −3.14 | −3.08 | 0.64 |
| PA1183_dctA_at (SEQ ID No: 812) | 100 | 0.053 | None | 0.05 | Down | 77 | −3.39 | −3.08 | 0.88 |
| PA5000_at (SEQ ID No: 813) | 100 | 0.075 | None | 0.05 | Down | 55 | −3.29 | −3.07 | 1.1 |
| PA3770_guaB_at (SEQ ID No: 814) | 100 | 0.076 | None | 0.05 | Down | 66 | −3.32 | −3.07 | 0.76 |
| PA5323_argB_at (SEQ ID No: 815) | 100 | 0.071 | None | 0.05 | Down | 66 | −3.19 | −3.07 | 0.76 |
| PA5174_at (SEQ ID No: 816) | 100 | 0.029 | Down | 0.05 | Down | 55 | −3.18 | −3.06 | 0.91 |
| PA3171_ubiG_at (SEQ ID No: 817) | 100 | 0.034 | Down | 0.05 | Down | 55 | −3.25 | −3.05 | 0.65 |
| PA1482_ccmH_at (SEQ ID No: 818) | 100 | 0.099 | None | 0.05 | Down | 55 | −3.34 | −3.04 | 0.79 |
| PA2646_nuoK_at (SEQ ID No: 819) | 100 | 0.225 | None | 0.05 | Down | 55 | −3.25 | −3.04 | 0.9 |
| PA2612_serS_at (SEQ ID No: 820) | 100 | 0.228 | None | 0.05 | Down | 66 | −3.29 | −3.03 | 0.75 |
| PA0527_dnr_at (SEQ ID No: 821) | 100 | 0.164 | None | 0.05 | Down | 88 | −3.13 | −3.03 | 0.64 |
| PA1660_at (SEQ ID No: 822) | 100 | 0.024 | Down | 0.05 | Down | 77 | −3.4 | −3.02 | 0.67 |
| PA3962_at (SEQ ID No: 823) | 100 | 0.01 | Down | 0.05 | Down | 77 | −3.35 | −3.02 | 0.79 |
| PA3031_at (SEQ ID No: 824) | 100 | 0.073 | None | 0.05 | Down | 88 | −3.28 | −3.02 | 0.79 |
| PA2780_at (SEQ ID No: 825) | 100 | 0.07 | None | 0.05 | Down | 88 | −3.37 | −2.99 | 0.88 |
| PA2649_nuoN_at (SEQ ID No: 826) | 100 | 0.101 | None | 0.05 | Down | 55 | −3.25 | −2.98 | 0.75 |
| PA2644_nuoI_at (SEQ ID No: 827) | 100 | 0.092 | None | 0.05 | Down | 66 | −3.12 | −2.97 | 0.62 |
| PA0730_at (SEQ ID No: 828) | 100 | 0.128 | None | 0.05 | Down | 66 | −3.23 | −2.94 | 0.93 |
| PA4403_secA_at (SEQ ID No: 829) | 100 | 0.058 | None | 0.05 | Down | 66 | −3.13 | −2.93 | 0.79 |
| PA3476_rhlL_at (SEQ ID No: 830) | 100 | 0.029 | Down | 0.05 | Down | 100 | −3.29 | −2.93 | 0.73 |
| PA3286_at (SEQ ID No: 831) | 100 | 0.018 | Down | 0.05 | Down | 66 | −3.22 | −2.92 | 0.87 |
| PA2980_at (SEQ ID No: 832) | 100 | 0.058 | None | 0.05 | Down | 66 | −3.16 | −2.91 | 0.8 |
| PA1642_selD_at (SEQ ID No: 833) | 100 | 0.006 | Down | 0.05 | Down | 55 | −3.03 | −2.9 | 0.66 |
| PA0537_at (SEQ ID No: 834) | 100 | 0.061 | None | 0.05 | Down | 66 | −3.12 | −2.9 | 0.75 |
| PA3524_gloA1_at (SEQ ID No: 835) | 100 | 0.07 | None | 0.05 | Down | 77 | −3.2 | −2.9 | 0.79 |
| PA5134_at (SEQ ID No: 836) | 100 | 0.023 | Down | 0.05 | Down | 55 | −3.12 | −2.89 | 0.79 |
| PA5038_aroB_at (SEQ ID No: 837) | 100 | 0.044 | Down | 0.05 | Down | 66 | −3.18 | −2.89 | 0.7 |
| PA5076_at (SEQ ID No: 838) | 100 | 0.114 | None | 0.05 | Down | 66 | −3.19 | −2.89 | 0.78 |
| PA2528_at (SEQ ID No: 839) | 100 | 0.024 | Down | 0.05 | Down | 55 | −3.11 | −2.88 | 0.77 |
| PA1504_at (SEQ ID No: 840) | 100 | 0.146 | None | 0.05 | Down | 66 | −3.11 | −2.88 | 0.79 |
| PA1102_fliG_at (SEQ ID No: 841) | 100 | 0.136 | None | 0.05 | Down | 55 | −3.13 | −2.87 | 0.81 |
| PA1421_speB2_at (SEQ ID No: 842) | 100 | 0.089 | None | 0.05 | Down | 88 | −3.18 | −2.87 | 0.79 |
| PA0582_folB_at (SEQ ID No: 843) | 100 | 0.036 | Down | 0.05 | Down | 55 | −3.21 | −2.86 | 0.87 |
| PA4411_murC_at (SEQ ID No: 844) | 100 | 0.019 | Down | 0.05 | Down | 55 | −3.11 | −2.86 | 0.86 |
| PA4054_ribB_at (SEQ ID No: 845) | 100 | 0.031 | Down | 0.05 | Down | 55 | −3.05 | −2.84 | 0.59 |
| PA1677_at (SEQ ID No: 846) | 100 | 0.108 | None | 0.05 | Down | 55 | −3.07 | −2.84 | 0.73 |
| PA5224_pepP_at (SEQ ID No: 847) | 100 | 0.06 | None | 0.05 | Down | 55 | −3.06 | −2.84 | 0.62 |
| PA0943_at (SEQ ID No: 848) | 100 | 0.164 | None | 0.05 | Down | 55 | −3.01 | −2.82 | 0.78 |
| PA1420_at (SEQ ID No: 849) | 100 | 0.058 | None | 0.05 | Down | 66 | −3.15 | −2.81 | 0.69 |
| PA5064_at (SEQ ID No: 850) | 100 | 0.059 | None | 0.05 | Down | 66 | −3.13 | −2.81 | 0.86 |
| PA4423_at (SEQ ID No: 851) | 100 | 0.075 | None | 0.05 | Down | 55 | −3 | −2.79 | 0.72 |
| PA3566_at (SEQ ID No: 852) | 100 | 0.012 | Down | 0.05 | Down | 88 | −3.06 | −2.78 | 0.61 |
| PA0900_at (SEQ ID No: 853) | 100 | 0.055 | None | 0.05 | Down | 66 | −3.02 | −2.77 | 0.7 |
| PA2953_at (SEQ ID No: 854) | 100 | 0.072 | None | 0.05 | Down | 55 | −3.09 | −2.74 | 0.86 |
| PA5344_at (SEQ ID No: 855) | 100 | 0.07 | None | 0.05 | Down | 55 | −3.02 | −2.74 | 0.66 |
| PA4345_at (SEQ ID No: 856) | 100 | 0.097 | None | 0.05 | Down | 55 | −2.95 | −2.73 | 0.6 |
| PA3262_at (SEQ ID No: 857) | 100 | 0.06 | None | 0.05 | Down | 55 | −3.04 | −2.68 | 0.62 |
| PA5227_at (SEQ ID No: 858) | 100 | 0.193 | None | 0.05 | Down | 55 | −2.98 | −2.68 | 0.74 |
| PA0083_at (SEQ ID No: 859) | 100 | 0.023 | Down | 0.05 | Down | 55 | −3.07 | −2.65 | 0.79 |
| PA2379_at (SEQ ID No: 860) | 100 | 0.048 | Down | 0.05 | Down | 77 | −3.18 | −2.64 | 0.86 |
| PA5479_gltP_at (SEQ ID No: 861) | 100 | 0.139 | None | 0.05 | Down | 55 | −3.05 | −2.62 | 0.93 |
| PA2322_at (SEQ ID No: 862) | 100 | 0.168 | None | 0.05 | Down | 77 | −3.07 | −2.62 | 0.88 |

Description
PA4243 /GENE = secY /DEF = secretion protein SecY /FUNCTION = Membrane proteins; Protein secretion/export apparatus (SEQ ID No: 639)
PA4242/GENE = rpmJ /DEF = 50S ribosomal protein L36 /FUNCTION = Translation, post-translational modification, degradation (SEQ ID No: 640)
PA5049/GENE = rpmE /DEF = 50S ribosomal protein L31 /FUNCTION = Translation, post-translational modification, degradation (SEQ ID No: 641)
PA3745/GENE = rpsP /DEF = 30S ribosomal protein S16 /FUNCTION = Translation, post-translational modification, degradation; DNA replication, recombination, modification and repair (SEQ ID No: 642)
PA3744 /GENE = rimM /DEF = 16S rRNA processing protein /FUNCTION = Transcription, RNA processing and degradation (SEQ ID No: 643)
PA4568/GENE = rplU /DEF = 50S ribosomal protein L21 /FUNCTION = Translation, post-translational modification, degradation (SEQ ID No: 644)
PA2966/GENE = acpP /DEF = acyl carrier protein /FUNCTION = Fatty acid and phospholipid metabolism (SEQ ID No: 645)
PA0492/DEF = conserved hypothetical protein /FUNCTION = Hypothetical, unclassified, unknown (SEQ ID No: 646)
PA4563/GENE = rpsT /DEF = 30S ribosomal protein S20 /FUNCTION = Translation, post-translational modification, degradation; Central intermediary metabolism (SEQ ID No: 647)
PA4245/GENE = rpmD /DEF = 50S ribosomal protein L30 /FUNCTION = Translation, post-translational modification, degradation (SEQ ID No: 648)
PA3656/GENE = rpsB /DEF = 30S ribosomal protein S2 /FUNCTION = Translation, post-translational modification, degradation (SEQ ID No: 649)
PA2971/DEF = conserved hypothetical protein /FUNCTION = Hypothetical, unclassified, unknown (SEQ ID No: 650)
PA4433 /GENE = rplM /DEF = 50S ribosomal protein L13 /FUNCTION = Translation, post-translational modification, degradation (SEQ ID No: 651)
PA5570/GENE = rpmH /DEF = 50S ribosomal protein L34 /FUNCTION = Central intermediary metabolism; Translation, post-translational modification, degradation (SEQ ID No: 652)
PA4240/GENE = rpsK /DEF = 30S ribosomal protein S11 /FUNCTION = Translation, post-translational modification, degradation (SEQ ID No: 653)
PA4239/GENE = rpsD /DEF = 30S ribosomal protein S4 /FUNCTION = Translation, post-translational modification, degradation (SEQ ID No: 654)
PA4262/GENE = rplD /DEF = 50S ribosomal protein L4 /FUNCTION = Transcription, RNA processing and degradation; Translation, post-translational modification, degradation (SEQ ID No: 655)
PA4268 /GENE = rpsL /DEF = 30S ribosomal protein S12 /FUNCTION = Translation, post-translational modification, degradation (SEQ ID No: 656)
PA4247/GENE = rplR /DEF = 50S ribosomal protein L18 /FUNCTION = Translation, post-translational modification, degradation (SEQ ID No: 657)
PA4263/GENE = rplC /DEF = 50S ribosomal protein L3 /FUNCTION = Translation, post-translational modification, degradation (SEQ ID No: 658)
PA3162/GENE = rpsA /DEF = 30S ribosomal protein S1 /FUNCTION = Translation, post-translational modification, degradation (SEQ ID No: 659)
PA5316/GENE = rpmB /DEF = 50S ribosomal protein L28 /FUNCTION = Translation, post-translational modification, degradation (SEQ ID No: 660)
tRNA_Glutamine, 5238277-5238351 (+) strand (SEQ ID No: 661)
PA4671/DEF = probable ribosomal protein L25 /FUNCTION = Adaptation, protection; Translation, post-translational modification, degradation (SEQ ID No: 662)
PA4272/GENE = rplJ /DEF = 50S ribosomal protein L10 /FUNCTION = Translation, post-translational modification, degradation (SEQ ID No: 663)
PA2619/GENE = infA /DEF = initiation factor /FUNCTION = Translation, post-translational modification, degradation (SEQ ID No: 664)
PA4241/GENE = rpsM /DEF = 30S ribosomal protein S13 /FUNCTION = Translation, post-translational modification, degradation (SEQ ID No: 665)
PA4482/GENE = gatC /DEF = Glu-tRNA (Gln) amidotransferase subunit C /FUNCTION = Translation, post-translational modification, degradation (SEQ ID No: 666)
PA2743/GENE = infC /DEF = translation initiation factor IF-3 /FUNCTION = Translation, post-translational modification, degradation (SEQ ID No: 667)
PA3742/GENE = rplS /DEF = 50S ribosomal protein L19 /FUNCTION = Translation, post-translational modification, degradation (SEQ ID No: 668)
PA5491/DEF = probable cytochrome /FUNCTION = Energy metabolism (SEQ ID No: 669)
PA4238/GENE = rpoA /DEF = DNA-directed RNA polymerase alpha chain /FUNCTION = Transcription, RNA processing and degradation (SEQ ID No: 670)
PA2321/DEF = gluconokinase /FUNCTION = Carbon compound catabolism; Energy metabolism (SEQ ID No: 671)
PA5276 /GENE = lppL /DEF = lipopeptide LppL precursor /FUNCTION = Cell wall/LPS/capsule (SEQ ID No: 672)
PA3743/GENE = trmD /DEF = tRNA (guanine-N1)-methyltransferase /FUNCTION = Transcription, RNA processing and degradation (SEQ ID No: 673)
PA2639/GENE = nuoD /DEF = NADH dehydrogenase I chain C, D /FUNCTION = Energy metabolism (SEQ ID No: 674)
PA1800/GENE = tig /DEF = trigger factor /FUNCTION = Cell division; Chaperones & heat shock proteins (SEQ ID No: 675)
PA5555/GENE = atpG /DEF = ATP synthase gamma chain /FUNCTION = Energy metabolism (SEQ ID No: 676)
PA2970/GENE = rpmF /DEF = 50S ribosomal protein L32 /FUNCTION = Translation, post-translational modification, degradation (SEQ ID No: 677)
PA1582/GENE = sdhD /DEF = succinate dehydrogenase (D subunit) /FUNCTION = Energy metabolism (SEQ ID No: 678)
PA4246/GENE = rpsE /DEF = 30S ribosomal protein S5 /FUNCTION = Translation, post-translational modification, degradation (SEQ ID No: 679)
PA0579/GENE = rpsU /DEF = 30S ribosomal protein S21 /FUNCTION = Hypothetical, unclassified, unknown (SEQ ID No: 680)
PA2634/DEF = probable isocitrate lyase /FUNCTION = Putative enzymes (SEQ ID No: 681)
PA1581/GENE = sdhC /DEF = succinate dehydrogenase (C subunit) /FUNCTION = Energy metabolism (SEQ ID No: 682)
PA5557/GENE = atpH /DEF = ATP synthase delta chain /FUNCTION = Energy metabolism (SEQ ID No: 683)
tRNA_Glycine, 4785688-4785761 (−) strand (SEQ ID No: 684)
PA5298/DEF = xanthine phosphoribosyltransferase /FUNCTION = Nucleotide biosynthesis and metabolism (SEQ ID No: 685)
PA4846/GENE = aroQ1 /DEF = 3-dehydroquinate dehydratase /FUNCTION = Amino acid biosynthesis and metabolism (SEQ ID No: 686)
PA0493/DEF = probable biotin-requiring enzyme /FUNCTION = Putative enzymes (SEQ ID No: 687)
PA3266/GENE = capB /DEF = cold acclimation protein B /FUNCTION = Adaptation, protection; Transcriptional regulators (SEQ ID No: 688)
PA4267/GENE = rpsG /DEF = 30S ribosomal protein S7 /FUNCTION = Translation, post-translational modification, degradation (SEQ ID No: 689)
PA4748/GENE = tpiA /DEF = triosephosphate isomerase /FUNCTION = Central intermediary metabolism; Energy metabolism (SEQ ID No: 690)
PA4847/GENE = accB /DEF = biotin carboxyl carrier protein (BCCP) /FUNCTION = Fatty acid and phospholipid metabolism (SEQ ID No: 691)
tRNA_Valine, 3650815-3650890 (−) strand (SEQ ID No: 692)
PA4249/GENE = rpsH /DEF = 30S ribosomal protein S8 /FUNCTION = Translation, post-translational modification, degradation (SEQ ID No: 693)
PA0856/DEF = hypothetical protein /FUNCTION = Hypothetical, unclassified, unknown (SEQ ID No: 694)
PA5569/GENE = rnpA /DEF = ribonuclease P protein component /FUNCTION = Translation, post-translational modification, degradation (SEQ ID No: 695)
PA0896/GENE = aruF /DEF = arginine/ornithine succinyltransferase Al subunit /FUNCTION = Amino acid biosynthesis and metabolism (SEQ ID No: 696)
PA4430/DEF = probable cytochrome b /FUNCTION = Energy metabolism (SEQ ID No: 697)
PA4935/GENE = rpsF /DEF = 30S ribosomal protein S6 /FUNCTION = Translation, post-translational modification, degradation (SEQ ID No: 698)
PA4031/GENE = ppa /DEF = inorganic pyrophosphatase /FUNCTION = Central intermediary metabolism (SEQ ID No: 699)
PA2744/GENE = thrS /DEF = threonyl-tRNA synthetase /FUNCTION = Amino acid biosynthesis and metabolism; Translation, post-translational modification, degradation (SEQ ID No: 700)
PA4942/GENE = hflK /DEF = protease subunit HflK /FUNCTION = Cell division; Translation, post-translational modification, degradation (SEQ ID No: 701)
PA1557/DEF = probable cytochrome oxidase subunit (cbb3-type) /FUNCTION = Energy metabolism (SEQ ID No: 702)
PA4406/GENE = lpxC /DEF = UDP-3-O-acyl-N-acetylglucosamine deacetylase /FUNCTION = Cell wall / LPS / capsule (SEQ ID No: 703)
PA3621/GENE = fdxA /DEF = ferredoxin I /FUNCTION = Energy metabolism (SEQ ID No: 704)
PA3644/GENE = lpxA /DEF = UDP-N-acetylglucosamine acyltransferase /FUNCTION = Cell wall / LPS / capsule (SEQ ID No: 705)
PA4053/GENE = ribE /DEF = 6,7-dimethyl-8-ribityllumazine synthase /FUNCTION = Biosynthesis of cofactors, prosthetic groups and carriers (SEQ ID No: 706)
PA4276/GENE = secE /DEF = secretion protein SecE /FUNCTION = Protein secretion/export apparatus (SEQ ID No: 707)
PA3811/GENE = hscB /DEF = heat shock protein HscB /FUNCTION = Chaperones & heat shock proteins (SEQ ID No: 708)
PA3645/GENE = fabZ /DEF = (3R)-hydroxymyristoyl-[acyl carrier protein] dehydratase /FUNCTION = Cell wall / LPS / capsule; Fatty acid and phospholipid metabolism (SEQ ID No: 709)
PA4431/DEF = probable iron-sulfur protein /FUNCTION = Putative enzymes (SEQ ID No: 710)
PA1156/GENE = nrdA /DEF = ribonucleoside reductase, large chain /FUNCTION = Nucleotide biosynthesis and metabolism (SEQ ID No: 711)
PA4762/GENE = grpE /DEF = heat shock protein GrpE /FUNCTION = DNA replication, recombination, modification and repair; Chaperones & heat shock proteins (SEQ ID No: 712)
PA3159/GENE = wbpA /DEF = probable UDP-glucose/GDP-mannose dehydrogenase WbpA /FUNCTION = Cell wall / LPS / capsule; Putative enzymes (SEQ ID No: 713)
PA4944/DEF = conserved hypothetical protein /FUNCTION = Hypothetical, unclassified, unknown (SEQ ID No: 714)
PA3636/GENE = kdsA /DEF = 2-dehydro-3-deoxyphosphooctonate aldolase /FUNCTION = Energy metabolism; Translation, post-translational modification, degradation; Carbon compound catabolism (SEQ ID No: 715)
PA4261/GENE = rplW /DEF = 50S ribosomal protein L23 /FUNCTION = Translation, post-translational modification, degradation (SEQ ID No: 716)
PA4252/GENE = rplX /DEF = 50S ribosomal protein L24 /FUNCTION = Translation, post-translational modification, degradation (SEQ ID No: 717)
PA4745/GENE = nusA /DEF = N utilization substance protein A /FUNCTION = Transcription, RNA processing and degradation (SEQ ID No: 718)
PA3635/GENE = eno /DEF = enolase /FUNCTION = Energy metabolism; Translation, post-translational modification, degradation; Carbon compound catabolism (SEQ ID No: 719)
PA0336/DEF = conserved hypothetical protein /FUNCTION = Hypothetical, unclassified, unknown (SEQ ID No: 720)
Intergenic region between PA4674 and PA4675, 5207621-5208463, (+) strand (SEQ ID No: 721)
PA5558/GENE = atpF /DEF = ATP synthase B chain /FUNCTION = Energy metabolism (SEQ ID No: 722)
PA2968/GENE = fabD /DEF = malonyl-CoA-[acyl-carrier-protein] transacylase /FUNCTION = Fatty acid and phospholipid metabolism (SEQ ID No: 723)
PA3832/GENE = holC /DEF = DNA polymerase III, chi subunit /FUNCTION = DNA replication, recombination, modification and repair (SEQ ID No: 724)
PA4483/GENE = gatA /DEF = Glu-tRNA (Gln) amidotransferase subunit A /FUNCTION = Translation, post-translational modification, degradation (SEQ ID No: 725)
PA2747/DEF = hypothetical protein /FUNCTION = Hypothetical, unclassified, unknown (SEQ ID No: 726)
tRNA_Histidine, 1947729-1947804 (+) strand (SEQ ID No: 727)
PA2624/GENE = idh /DEF = isocitrate dehydrogenase /FUNCTION = Energy metabolism (SEQ ID No: 728)
PA2453/DEF = hypothetical protein /FUNCTION = Hypothetical, unclassified, unknown (SEQ ID No: 729)
PA4258/GENE = rplV /DEF = 50S ribosomal protein L22 /FUNCTION = Translation, post-translational modification, degradation (SEQ ID No: 730)
PA4743/GENE = rbfA /DEF = ribosome-binding factor A /FUNCTION = Adaptation, protection; Translation, post-translational modification, degradation (SEQ ID No: 731)
PA1533/DEF = conserved hypothetical protein /FUNCTION = Hypothetical, unclassified, unknown (SEQ ID No: 732)
PA1123/DEF = hypothetical protein /FUNCTION = Hypothetical, unclassified, unknown (SEQ ID No: 733)
PA5490/GENE = cc4 /DEF = cytochrome c4 precursor /FUNCTION = Energy metabolism (SEQ ID No: 734)
PA3001/DEF = probable glyceraldehyde-3-phosphate dehydrogenase /FUNCTION = Putative enzymes (SEQ ID No: 735)
PA1013/GENE = purC /DEF = phosphoribosylaminoimidazole-succinocarboxamide synthase /FUNCTION = Nucleotide biosynthesis and metabolism (SEQ ID No: 736)
PA3987/GENE = leuS /DEF = leucyl-tRNA synthetase /FUNCTION = Amino acid biosynthesis and metabolism; Translation, post-translational modification, degradation (SEQ ID No: 737)
PA4761/GENE = dnaK /DEF = DnaK protein /FUNCTION = Adaptation, protection; Chaperones & heat shock proteins; DNA replication, recombination, modification and repair (SEQ ID No: 738)
PA3701/GENE = prfB /DEF = peptide chain release factor 2 /FUNCTION = Translation, post-translational modification, degradation (SEQ ID No: 739)
PA5128/GENE = secB /DEF = secretion protein SecB /FUNCTION = Protein secretion/export apparatus (SEQ ID No: 740)
PA4253/GENE = rplN /DEF = 50S ribosomal protein L14 /FUNCTION = Translation, post-translational modification, degradation (SEQ ID No: 741)
PA4386 /GENE = groES /DEF = GroES protein /FUNCTION = Chaperones & heat shock proteins (SEQ ID No: 742)
PA5067/GENE = hisE /DEF = phosphoribosyl-ATP pyrophosphohydrolase /FUNCTION = Amino acid biosynthesis and metabolism (SEQ ID No: 743)
PA4880/DEF = probable bacterioferritin /FUNCTION = Central intermediary metabolism (SEQ ID No: 744)
PA1610/GENE = fabA /DEF = beta-hydroxydecanoyl-ACP dehydrase /FUNCTION = Fatty acid and phospholipid metabolism (SEQ ID No: 745)
PA3807/GENE = ndk /DEF = nucleoside diphosphate kinase /FUNCTION = Nucleotide biosynthesis and metabolism (SEQ ID No: 746)
PA4266/GENE = fusA1 /DEF = elongation factor G /FUNCTION = Translation, post-translational modification, degradation (SEQ ID No: 747)
PA0972/GENE = tolB /DEF = TolB protein /FUNCTION = Transport of small molecules (SEQ ID No: 748)
PA4232/GENE = ssb /DEF = single-stranded DNA-binding protein /FUNCTION = DNA replication, recombination, modification and repair (SEQ ID No: 749)
PA3700/GENE = lysS /DEF = lysyl-tRNA synthetase /FUNCTION = Amino acid biosynthesis and metabolism; Translation, post-translational modification, degradation (SEQ ID No: 750)
PA4460/DEF = conserved hypothetical protein /FUNCTION = Hypothetical, unclassified, unknown (SEQ ID No: 751)
PA5069/GENE = tatB /DEF = translocation protein TatB /FUNCTION = Protein secretion/export apparatus (SEQ ID No: 752)
PA4853/GENE = fis /DEF = DNA-binding protein Fis /FUNCTION = DNA replication, recombination, modification and repair; Transcriptional regulators (SEQ ID No: 753)
PA0019/GENE = def /DEF = polypeptide deformylase /FUNCTION = Translation, post-translational modification, degradation (SEQ ID No: 754)
PA0595/GENE = ostA /DEF = organic solvent tolerance protein OstA precursor /FUNCTION = Adaptation, protection (SEQ ID No: 755)
PA4848/GENE = accC /DEF = biotin carboxylase /FUNCTION = Fatty acid and phospholipid metabolism (SEQ ID No: 756)
PA1580/GENE = gltA /DEF = citrate synthase /FUNCTION = Energy metabolism (SEQ ID No: 757)
PA4259/GENE = rpsS /DEF = 30S ribosomal protein S19 /FUNCTION = Translation, post-translational modification, degradation (SEQ ID No: 758)
PA2976/GENE = rne /DEF = ribonuclease E /FUNCTION = Transcription, RNA processing and degradation (SEQ ID No: 759)
PA1574/DEF = conserved hypothetical protein /FUNCTION = Hypothetical, unclassified, unknown (SEQ ID No: 760)
PA2023 /GENE = galU /DEF = UTP--glucose-1-phosphate uridylyltransferase /FUNCTION = Central intermediary metabolism (SEQ ID No: 761)
PA4740/GENE = pnp /DEF = polyribonucleotide nucleotidyltransferase /FUNCTION = Transcription, RNA processing and degradation (SEQ ID No: 762)
PA3907/DEF = hypothetical protein /FUNCTION = Hypothetical, unclassified, unknown (SEQ ID No: 763)
PA2960/GENE = pilZ /DEF = type 4 fimbrial biogenesis protein PilZ /FUNCTION = Motility & Attachment (SEQ ID No: 764)
PA4425/DEF = probable phosphoheptose isomerase /FUNCTION = Putative enzymes (SEQ ID No: 765)
PA5068/GENE = tatA /DEF = translocation protein TatA /FUNCTION = Protein secretion/export apparatus (SEQ ID No: 766)
PA3686/GENE = adk /DEF = adenylate kinase /FUNCTION = Nucleotide biosynthesis and metabolism (SEQ ID No: 767)
PA4759/GENE = dapB /DEF = dihydrodipicolinate reductase /FUNCTION = Amino acid biosynthesis and metabolism (SEQ ID No: 768)
PA4292/DEF = probable phosphate transporter /FUNCTION = Membrane proteins; Transport of small molecules (SEQ ID No: 769)
PA1552/DEF = probable cytochrome c /FUNCTION = Energy metabolism (SEQ ID No: 770)
PA5143/GENE = hisB /DEF = imidazoleglycerol-phosphate dehydratase /FUNCTION = Amino acid biosynthesis and metabolism (SEQ ID No: 771)
PA3014/GENE = faoA /DEF = fatty-acid oxidation complex alpha-subunit /FUNCTION = Amino acid biosynthesis and metabolism; Fatty acid and phospholipid metabolism (SEQ ID No: 772)
PA1505/GENE = moaA2 /DEF = molybdopterin biosynthetic protein A2 /FUNCTION = Biosynthesis of cofactors, prosthetic groups and carriers (SEQ ID No: 773)
PA3981/DEF = conserved hypothetical protein /FUNCTION = Hypothetical, unclassified, unknown (SEQ ID No: 774)
PA2965 /GENE = fabF1 /DEF = beta-ketoacyl-acyl carrier protein synthase II /FUNCTION = Fatty acid and phospholipid metabolism (SEQ ID No: 775)
PA0857/GENE = bolA /DEF = morphogene protein BolA /FUNCTION = Cell division (SEQ ID No: 776)
PA5315/GENE = rpmG /DEF = 50S ribosomal protein L33 /FUNCTION = Translation, post-translational modification, degradation (SEQ ID No: 777)
PA3861/GENE = rhlB /DEF = ATP-dependent RNA helicase RhlB /FUNCTION = Transcription, RNA processing and degradation (SEQ ID No: 778)
tRNA_Asparagine, 3524012-3524087 (+) strand (SEQ ID No: 779)
PA3575/DEF = hypothetical protein /FUNCTION = Hypothetical, unclassified, unknown; Membrane proteins (SEQ ID No: 780)
PA1774 /DEF = hypothetical protein /FUNCTION = Hypothetical, unclassified, unknown; Membrane proteins (SEQ ID No: 781)
PA4333/DEF = probable fumarase /FUNCTION = Energy metabolism (SEQ ID No: 782)
PA2667/DEF = conserved hypothetical protein /FUNCTION = Transcriptional regulators (SEQ ID No: 783)
PA2979/GENE = kdsB /DEF = 3-deoxy-manno-octulosonate cytidylyltransferase /FUNCTION = Cell wall / LPS / capsule (SEQ ID No: 784)
PA4006/DEF = hypothetical protein /FUNCTION = Hypothetical, unclassified, unknown (SEQ ID No: 785)
PA1008/GENE = bcp /DEF = bacterioferritin comigratory protein /FUNCTION = Adaptation, protection (SEQ ID No: 786)
PA4271/GENE = rplL /DEF = 50S ribosomal protein L7 / L12 /FUNCTION = Translation, post-translational modification, degradation (SEQ ID No: 787)
PA3480/DEF = probable deoxycytidine triphosphate deaminase /FUNCTION = Nucleotide biosynthesis and metabolism (SEQ ID No: 788)
PA4503/DEF = probable permease of ABC transporter /FUNCTION = Membrane proteins; Transport of small molecules (SEQ ID No: 789)
PA5119/GENE = glnA /DEF = glutamine synthetase /FUNCTION = Amino acid biosynthesis and metabolism (SEQ ID No: 790)
PA5054/GENE = hslU /DEF = heat shock protein HslU /FUNCTION = Chaperones & heat shock proteins (SEQ ID No: 791)
PA2950/DEF = hypothetical protein /FUNCTION = Hypothetical, unclassified, unknown (SEQ ID No: 792)
PA1609/GENE = fabB /DEF = beta-ketoacyl-ACP synthase I /FUNCTION = Fatty acid and phospholipid metabolism (SEQ ID No: 793)
PA3637/GENE = pyrG /DEF = CTP synthase /FUNCTION = Nucleotide biosynthesis and metabolism (SEQ ID No: 794)
PA5429/GENE = aspA /DEF = aspartate ammonia-lyase /FUNCTION = Amino acid biosynthesis and metabolism (SEQ ID No: 795)
PA5322/GENE = algC /DEF = phosphomannomutase AlgC /FUNCTION = Amino acid biosynthesis and metabolism; Cell wall / LPS / capsule; Secreted Factors (toxins, enzymes, alginate) (SEQ ID No: 796)
PA0429/DEF = hypothetical protein /FUNCTION = Hypothetical, unclassified, unknown (SEQ ID No: 797)
PA3369/DEF = hypothetical protein /FUNCTION = Hypothetical, unclassified, unknown; Membrane proteins (SEQ ID No: 798)
PA4559/GENE = lspA /DEF = prolipoprotein signal peptidase /FUNCTION = Protein secretion/export apparatus; Translation, post-translational modification, degradation (SEQ ID No: 799)
PA1659/DEF = hypothetical protein /FUNCTION = Hypothetical, unclassified, unknown (SEQ ID No: 800)
PA0357/GENE = mutM /DEF = formamidopyrimidine-DNA glycosylase /FUNCTION = DNA replication, recombination, modification and repair (SEQ ID No: 801)
PA5063/GENE = ubiE /DEF = ubiquinone biosynthesis methyltransferase UbiE /FUNCTION = Biosynthesis of cofactors, prosthetic groups and carriers; Energy metabolism (SEQ ID No: 802)
PA0555/GENE = fda /DEF = fructose-1,6-bisphosphate aldolase /FUNCTION = Carbon compound catabolism; Central intermediary metabolism (SEQ ID No: 803)
PA3440/DEF = conserved hypothetical protein /FUNCTION = Hypothetical, unclassified, unknown (SEQ ID No: 804)
PA1009/DEF = hypothetical protein /FUNCTION = Hypothetical, unclassified, unknown (SEQ ID No: 805)
PA1010 /GENE = dapA /DEF = dihydrodipicolinate synthase /FUNCTION = Amino acid biosynthesis and metabolism (SEQ ID No: 806)
PA3626/DEF = conserved hypothetical protein /FUNCTION = Hypothetical, unclassified, unknown (SEQ ID No: 807)
PA1462/DEF = probable plasmid partitioning protein /FUNCTION = Cell division (SEQ ID No: 808)
PA4264/GENE = rpsJ /DEF = 30S ribosomal protein S10 /FUNCTION = Translation, post-translational modification, degradation; Transcription, RNA processing and degradation (SEQ ID No: 809)
PA5078/DEF = conserved hypothetical protein /FUNCTION = Hypothetical, unclassified, unknown (SEQ ID No: 810)
PA0766/GENE = mucD /DEF = serine protease MucD precursor /FUNCTION = Cell wall / LPS / capsule; Putative enzymes; Secreted Factors (toxins, enzymes, alginate) (SEQ ID No: 811)
PA1183/GENE = dctA /DEF = C4-dicarboxylate transport protein /FUNCTION = Transport of small molecules (SEQ ID No: 812)
PA5000/DEF = probable glycosyl transferase /FUNCTION = Putative enzymes (SEQ ID No: 813)
PA3770/GENE = guaB /DEF = inosine-5-monophosphate dehydrogenase /FUNCTION = Nucleotide biosynthesis and metabolism (SEQ ID No: 814)
PA5323/GENE = argB /DEF = acetylglutamate kinase /FUNCTION = Amino acid biosynthesis and metabolism (SEQ ID No: 815)
PA5174/DEF = probable beta-ketoacyl synthase /FUNCTION = Fatty acid and phospholipid metabolism (SEQ ID No: 816)
PA3171/GENE = ubiG /DEF = 3-demethylubiquinone-9 3-methyltransferase /FUNCTION = Biosynthesis of cofactors, prosthetic groups and carriers; Energy metabolism (SEQ ID No: 817)
PA1482/GENE = ccmH /DEF = cytochrome C-type biogenesis protein CcmH /FUNCTION = Energy metabolism (SEQ ID No: 818)
PA2646/GENE = nuoK /DEF = NADH dehydrogenase I chain K /FUNCTION = Energy metabolism (SEQ ID No: 819)
PA2612/GENE = serS /DEF = seryl-tRNA synthetase /FUNCTION = Amino acid biosynthesis and metabolism; Translation, post-translational modification, degradation (SEQ ID No: 820)
PA0527/GENE = dnr /DEF = transcriptional regulator Dnr /FUNCTION = Transcriptional regulators (SEQ ID No: 821)
PA1660/DEF = hypothetical protein /FUNCTION = Hypothetical, unclassified, unknown (SEQ ID No: 822)
PA3962/DEF = hypothetical protein /FUNCTION = Hypothetical, unclassified, unknown (SEQ ID No: 823)
PA3031/DEF = hypothetical protein /FUNCTION = Hypothetical, unclassified, unknown (SEQ ID No: 824)
PA2780/DEF = hypothetical protein /FUNCTION = Hypothetical, unclassified, unknown (SEQ ID No: 825)
PA2649/GENE = nuoN /DEF = NADH dehydrogenase I chain N /FUNCTION = Energy metabolism (SEQ ID No: 826)
PA2644/GENE = nuoI /DEF = NADH Dehydrogenase I chain I /FUNCTION = Energy metabolism (SEQ ID No: 827)
PA0730/DEF = probable transferase /FUNCTION = Putative enzymes (SEQ ID No: 828)
PA4403/GENE = secA /DEF = secretion protein SecA /FUNCTION = Protein secretion/export apparatus (SEQ ID No: 829)
PA3476/GENE = rhlL /DEF = autoinducer synthesis protein RhlL /FUNCTION = Adaptation, protection (SEQ ID No: 830)
PA3286 /DEF = hypothetical protein /FUNCTION = Hypothetical, unclassified, unknown (SEQ ID No: 831)
PA2980/DEF = conserved hypothetical protein /FUNCTION = Hypothetical, unclassified, unknown (SEQ ID No: 832)
PA1642/GENE = selD /DEF = selenophosphate synthetase /FUNCTION = Translation, post-translational modification, degradation (SEQ ID No: 833)
PA0537/DEF = conserved hypothetical protein /FUNCTION = Hypothetical, unclassified, unknown (SEQ ID No: 834)
PA3524/GENE = gloA1 /DEF = lactoylglutathione lyase /FUNCTION = Central intermediary metabolism (SEQ ID No: 835)
PA5134/DEF = probable carboxyl-terminal protease /FUNCTION = Translation, post-translational modification, degradation (SEQ ID No: 836)
PA5038 /GENE = aroB /DEF = 3-dehydroquinate synthase /FUNCTION = Amino acid biosynthesis and metabolism (SEQ ID No: 837)
PA5076/DEF = probable binding protein component of ABC transporter /FUNCTION = Transport of small molecules (SEQ ID No: 838)
PA2528/DEF = probable RND efflux membrane fusion protein precursor /FUNCTION = Transport of small molecules (SEQ ID No: 839)
PA1504/DEF = probable transcriptional regulator /FUNCTION = Transcriptional regulators (SEQ ID No: 840)
PA1102/GENE = fliG /DEF = flagellar motor switch protein FliG /FUNCTION = Motility & Attachment; Cell wall / LPS / capsule (SEQ ID No: 841)
PA1421/GENE = speB2 /DEF = agmatinase /FUNCTION = Amino acid biosynthesis and metabolism (SEQ ID No: 842)
PA0582/GENE = folB /DEF = dihydroneopterin aldolase /FUNCTION = Biosynthesis of cofactors, prosthetic groups and carriers (SEQ ID No: 843)
PA4411/GENE = murC /DEF = UDP-N-acetylmuramate--alanine ligase /FUNCTION = Cell wall / LPS / capsule (SEQ ID No: 844)
PA4054/GENE = ribB /DEF = GTP cyclohydrolase II/3,4-dihydroxy-2-butanone 4-phosphate synthase /FUNCTION = Biosynthesis of cofactors, prosthetic groups and carriers (SEQ ID No: 845)
PA1677/DEF = conserved hypothetical protein /FUNCTION = Hypothetical, unclassified, unknown (SEQ ID No: 846)
PA5224/GENE = pepP /DEF = aminopeptidase P /FUNCTION = Translation, post-translational modification, degradation (SEQ ID No: 847)
PA0943/DEF = hypothetical protein /FUNCTION = Hypothetical, unclassified, unknown (SEQ ID No: 848)
PA1420/DEF = hypothetical protein /FUNCTION = Hypothetical, unclassified, unknown (SEQ ID No: 849)
PA5064/DEF = hypothetical protein /FUNCTION = Hypothetical, unclassified, unknown (SEQ ID No: 850)
PA4423/DEF = conserved hypothetical protein /FUNCTION = Hypothetical, unclassified, unknown (SEQ ID No: 851)
PA3566/DEF = conserved hypothetical protein /FUNCTION = Hypothetical, unclassified, unknown (SEQ ID No: 852)
PA0900/DEF = hypothetical protein /FUNCTION = Hypothetical, unclassified, unknown (SEQ ID No: 853)
PA2953/DEF = electron transfer flavoprotein-ubiquinone oxidoreductase /FUNCTION = Energy metabolism (SEQ ID No: 854)
PA5344/DEF = probable transcriptional regulator /FUNCTION = Transcriptional regulators (SEQ ID No: 855)
PA4345/DEF = hypothetical protein /FUNCTION = Hypothetical, unclassified, unknown (SEQ ID No: 856)
PA3262/DEF = probable peptidyl-prolyl cis-trans isomerase, FkbP-type /FUNCTION = Translation, post-translational modification, degradation; Chaperones & heat shock proteins (SEQ ID No: 857)
PA5227/DEF = conserved hypothetical protein /FUNCTION = Hypothetical, unclassified, unknown (SEQ ID No: 858)
PA0083/DEF = conserved hypothetical protein /FUNCTION = Hypothetical, unclassified, unknown (SEQ ID No: 859)
PA2379/DEF = probable oxidoreductase /FUNCTION = Putative enzymes (SEQ ID No: 860)
PA5479/GENE = gltP /DEF = proton-glutamate symporter /FUNCTION = Membrane proteins; Transport of small molecules (SEQ ID No: 861)
PA2322/DEF = gluconate permease /FUNCTION = Transport of small molecules (SEQ ID No: 862)

TABLE 8

| | % P flight- | | | | sig-Mann- | | | |
|---|---|---|---|---|---|---|---|---|
| | Percent | | sig-T-Test | sig-Mann- | Whitney | | | |
| | sig-T- | | Change | Whitney | Change | % I/MI- | sig log ratio- | sig log ratio- |
| | Test | P Value | Direction | P Value | Direction | Percent | Average | Median |
| PA0523_norC_at (SEQ ID No: 863) | 100 | 0.191 | None | 0.05 | Up | 88 | 0.28 | 0.92 |
| PA0524_norB_at (SEQ ID No: 864) | 100 | 0.094 | None | 0.05 | Up | 88 | −0.36 | 0.25 |

The application's sequence listing, which the Patent Office published only in electronic form, follows.

SEQUENCE LISTING (874 sequences)

SEQ ID NO: 1 - DNA, 1488 bp, Salmonella typhimurium
ttaacgcagtaaagagaggacgttttgcggaacctggttcgcctgcgccagaacggaggtaccggcctgctgcagaatctgcgcgcgagacatgttggaaacttcggtcgcgtagtcggaatcttcgatacggctacgggcagaagtcaggttgtttacggtgttgcccaggttggtaatagcggagttgaaacggttctgtaccgcacccaggtcagaacgtaacgtgtcaacctgtgccaaagcagcatcaattttctgcagcgggttttcggtggttgtagcagccgcttccgccagatcaggctgtgctttaaagttgtgaccttcggctttacttgcagcgtaagttttaccaccaatagaaacaacttcggttttgccgtctgcgccacccagtttgtttagtgcagttttggatgtaccgtcatctgcagtgtatttcgtagtattaatacttatggaaccatctttattttgagttgcagaatagtaatcatcgcctaccttaactgctaaaccaccatcaatagttttaccgttattatcagtataagacatcttaacaacagatgctgtgccggtaacacctgctgctgtcaatgcggctttagcctctgtcaaatcagcatttgcaacttgtacatttttcacatcctcagttgctgtcgcaggtagtccacctgtaagcggggaagtcgcaccgccagcaagagtcacctcaccgttcgtcttatcaacggaaacttcataatagccatctttaccagttccccccgtaacggtaactttggcgtaatattttccagtcgtatcatcaaattttaaatcgccatcaattttctggtcagtaccaccaagaccagtagccgaggctttaaaagtactattgtctaaagcaatcgtagtatcggcatatcctgtaacagttgcagccgtatcgctgaccttatatttttgttgcacattcagcgtatccagacccagggtctgagagttgatctgcttcagatcgatatcgatagtttcaccgtcgttggcaccaacctggatggtcagggtgttgtcctgcgccaggactttcacgccgttgaactgagtctggccggatacacggtcgatttcgttcaggcgctgggtgatttcagcctggatggagtcgaggtcagactgggagttggtgctgttagcagactgaaccgccagttcacgcacacgctgcaggttgttgttgatttcgttcagcgcgccttcagtggtctgcgcaatggagataccgtcgttagcgttacgggaagcctgagtcagacctttgatgttcgcggtaaaacggttagcaatcgcctgacctgccgcatcgtctttcgcgctgttgatacgcagaccggaagacagacgctcgatagcggtgcccagagcggactgggatttgttcaggttattctgggtcaacagcgacaggctgtttgtattaatgacttgtgccat

SEQ ID NO: 2 - DNA, 2349 bp, Salmonella typhimurium
atgaagatatcatcaggcgcaattaatttttctactattcctaaccaggttaaaaaattaattacctctattcgtgaacatacgaaaaacgggctcacctcaaaaataaccagtgttaaaaacacgcatacatctttaaatgaaaaatttaaaacaggaaaggactcaccgattgagttcgcgttaccacaaaaaataaaagacttctttcagccgaaagataaaaacaccttaaacaaaacattgattactgttaaaaatattaaagatacaaataatgcaggcaagaaaaatatttcagcagaagatgtctcaaaaatgaatgcagcattcatgcgtaagcatattgcaaatcaaacatgtgattataattacagaatgacaggtgcggccccgctccccggtggagtctctgtatcagccaataacaggcccacggtttctgaaggtagaacaccaccagtatccccctccctctcacttcaggctacctcttccccgtcatcacctgccgactgggctaagaaactcacggatgcagttttacgacagaaagccggagaaacccttacggccgcagatcgcgatttttcaaacgcagatttccgtaatattacattcagcaaaatattgccccccagcttcatggagcgagacggcgatattattaaggggttcaacttttcaaattcaaaatttacttattctgatatatctcatttacattttgacgaatgccgattcacttattcgacactgagtgatgtagtctgcagtaatacgaaatttagtaattcagacatgaatgaagtgtttttacagtattcaattactacacaacaacagccctcgtttattgatacaacattaaaaaatacgcttatacgtcacaaagccaacctctctggcgttattttaaatgaaccggataattcatcacctccgtcagtgtcagggggcggaaattttattcgtctaggtgatatctggctgcaaatgccactcctttggactgagaacgctgtggatggatttttaaatcatgagcacaataatggtaaaagtattctgatgaccattgacagcctgcccgataaatacagtcaggaaaaagtccaggcaatggaagacctggttaagtcattgcggggtggccgcttaacagaggcatgtatccggccagttgaaagttcgctggtaagcgtactggcccaccccccctatacgcaaagtgcgcttatcagcgagtggctcgggcctgttcaggaacgtttttttgcccaccagtgccagacctataatgacgttcccctgccggctcctgacacatattatcagcagcgcatactgcctgtgttgctggattcgtttgacaggaacagcgccgccatgaccactcacagcggactctttaatcaggtgattttacactgtatgacaggcgtggactgcactgatggcacccgccagaaagctgcagcgctttatgaacagtatcttgctcacccggcggtgtctccccacatccataatgggctcttcggcaattatgatggcagcccggactggacaacccgcgctgcagataatttcctgctgctttcctcccaagattcagacacggcgatgatgctctccactgacacgctgttaacaatgctaaaccctactcctgacactgcatgggacaacttttacctgctgcgagccggagagaacgtttccaccgcgcaaatctctccggtagagttattccgtcatgactttccggtgtttctcgccgcatttaatcagcaggccacgcagcgacgctttggggagctgattgatatcatcctcagcactgaagagcacggggagctgaaccagcagtttcttgccgccacgaaccagaaacattccaccgtgaagttgattgatgatgcctcagtgtcgcgtctggccaccatttttgaccccttgcttcctgaaggcaaactcagcccggcacactaccagcacatcctcagtgcttatcacctgacggacgccaccccacagaagcaggcggaaaccctgttctgtctcagtaccgcattcgcacgctattcctccagcgccattttcggcactgagcatgactctccgccggccctgagaggctatgcggaggcgctgatgcagaaagcctgggagctgtctccggcgatattcccatccagcgaacagtttaccgagtggtccgaccgttttcacggcctccatggcgcctttacctgtaccagcgttgtggcggatagtatgcaacgtcatgccagaaaatatttcccgagtgttctgtcatccatcctgccactggcctgggcgtag

SEQ ID NO: 3 - DNA, 1032 bp, Salmonella typhimurium
ttatccttgcaggaagcttttggcggtttccaggctgctacttatcgtactgctcagcacttttaccaggttgtcgtacaatgaattggcattgctatatttttgcgtcagcgtctgtaatgtggttttcatattttcttcctgcgctttaaaacccgactgccaggcttgatatttggcgttatccatttcgagttttgagtcttttcccggcgcgcctaaaccatcaatatcctgaaccattttttgtaatggcgtcagatcaacggtgacgacataaccggatccataagatttcaggcagctattcggtaaattcaattcactgagccactgtctcgcttccgcttcagtggctactttaacgccgctgcctgactgcgctggaaataaaacggtattactgtttatttgattatatttattgactaaactgtttaaatcatttttgagtgaggtaacatctagcttaacggtattaccgtccttacctggtaataaccagcctcccattttggaaagaatatcactgaaggcctgataaaaatcggtatagactgcgacaacgttttcataaacgcccagatagctgtcacctatcgccgatatattttgggaaaccatatcccaaatctcagcatcagaaatggttgttctcggctgcgccataggcgaagcgctaaataaggccgacgtcggcgcagaaaacgcgctccgcaggttctcattttgttctgcggataatgacacgccggacttcgccagcgcattcaggctgctggtcaactgctggcgcgccagcgtgcgctcgtcattattctcttcagagatcggtggcgttgactgcagcgtctgctgtgcctggtggattttagtagccgcctgcgataatgaaatgatatctgtaccgcgatgttctgtggtagacggtaccacggcagtctcgacgtgctcgctcgccgagggagtctgcggccgttcggcaacgatccccggatgaggagaagcggaataattttgaatattaagcat

SEQ ID NO: 4 - DNA, 1230 bp, Salmonella typhimurium
ttaagcgcgaatattgcctgcgatagcagcgagtgcggatgctttcgactggttaatgctctccattgttttcagcatttcctgaatcaggctggtcgatttacgtgaactttcacgggcttcgtccgatgcggtgctggcaacccggttattcacctggctaatttgctgctcggaacgttcctgagtagcggcgtactgcccggacgcccctgcaataccaccgaccgtgaccgagttcttcataatcagatcgcccgtcatctgcatcttgcgcgcatcgattcgggtcatatccatggtattctgctcaagacgaatatcggattcgacagactcaagacgtttcgacagaatagcctgatgttcaggggagatttgtttattactgtctttaatacccagactttccgtggcgctggttccggcattagatttaagcgtcgcatcattaagatttttcgtcgcatcggtaccggttttcttcatatttaacgatttcagagaatcgacgccttcagcaccgagtttgacgctattctgcccgttcagcacgtttttaatactgtggctttcagtggtcagtttatcgatcttcgcggcattatgtttaagcgcgcctctttcattctgcagccccttatattccagtttggcgcccacgccagtgatccccaactgaagcgcgctctgggaaatactaccggacaacgcattcatcccttcgcgcatcatggagcttgccgtcgttttagctgcatcaaaactgactaatgacaacttaccagacagtttgctatcagcctggttcaacgtcagcattaacgtattcgcggcagccaacagcgcaacggcactggaagacattccgctaatatcaaaaaactttccgacttctgcctgctgctcgcgtaactgggtttgcacaacctcattcgctttagtcgtgacattatttgccagagcattcaaatcctgattcatgtcggtattttgaatactggcttttaaaaaggacgtgatcgttccgggggtttgcgttaatacccctggcgcaggcgcgctcagtgtaggactcaaccccaggtcactgactttactgctgctaataccaatactattcagaatatctttagcgctaacggattgcgaagctgtctgtgaactattctcaacagaatgattatttaaataagcggcgggatttattcccacattactaattaacat

SEQ ID NO: 5 - DNA, 624 bp, Salmonella typhimurium
atgttatctttaagcaagccactacaggaattctacagactcgataaatgcctttctaagcatggtacgcgtttcgagtttgttaacgataaagagattatctgttcacctgatgaaagtaatacccatacctttgttattttagagggggttgtttcgttagttcggggtgataaagttcttattggtattgtgcaggccccttttatttttggcttagccgatggcgtggcgaaaaaagaggcacaatataaattaattgcggagagcggttgcatcggttatcgcctctcatcatcacaaactctcgccatcattgagcagaaccaactgtggcgtgaagccttctgttggatagtatggaaaagtcaggtactggaacttcgtgacaagcagctcattggtaataattcttacgaccaaattcgtgcgacgttaatgacaatgattgagtgggatgaagaacttcgctcacgtattggtgttatgaattatattcatcaacgaacgcgcgtatcgcgatcggtggtggcggaagttctcgcggccctgcgtaagggtaattacattgaaatgaataaaggcaaactgatcagtattaaccgtttgccctccgaatattaa

SEQ ID NO: 6 - DNA, 1053 bp, Salmonella typhimurium
ttaagcctgcggctgagttaccacgtctttaacgcctttaacttcgatctctacgcgacgatccggagccaggcaatcgatcagggcagcgcgaggtttcacgttgtcacaggtgttgccggtaaccgggttagattcgcccataccacgtgcggagattttgtcagacggaatacctttggagatcaggtaatcaacaacagactgagcacgtttctcggacagaccctggttgtaagcgtcagaaccgatacggtcagtgaagcccagaacgacaacggaaccgtctttcggatccaggttgctcagctggctgtacagctgatccagagcctgctggccttccggcttcagggtagatttgttgaagttgaacagtacgtcagacttcagagtgaagtgcttggtctgtacttccggagccggagctggtgccggagctactaccggagcagcttcttgctggccgaaacggtaggaaacacctacgctcagcaggccgttgtccggacgggtgccgatggtgttggcatcaccgatgttgttagtccactggtattccagacgggttgcgatttcaggggtgatagcatactcgataccgcccgcgaataccggggaaacgccggtgtcgtggtctttagtagacgggccgccagggacgttagacttggtgtctgcacgccataccataccacccagacgggtataaacgtccagatcgtcagtgattggataacccagtttagcggtcaactgaacgccctgagctttataagcgccattgatgttgtcgcctttgtacggcatacggcctaaccagtcgtagcccatttcaaagccaacatacgggttaacctggtaaccaccaaaagcacctgcgcccagttggttttcatgagtcgggccatcattgtgaatgaagccggtgtcatggtactgagaccagcccagtttagcaccagcgtaccaggtgttatctttcggagcggcctgcgctacggtagcgaaaccagccagtgccactgcaatcgcgatagctgtctttttcat

SEQ ID NO: 7 - DNA, 1089 bp, Salmonella typhimurium
atgaaacttaagttagtggcagtggcagtgacttccctgttggcagcaggcgttgtaaatgcagccgaggtatataacaaagacggcaataaactggatctgtacggtaaagttcacgctcagcattatttctctgatgataacggaagtgatggtgacaaaacttacgcgcgtctgggctttaaaggcgaaacgcagatcaacgatcagttaaccggttttggccagtgggaatatgaattcaaaggcaaccgtactgaaagccagggcgctgacaaagacaaaacccgtctggcgtttgctggtctgaaattcgctgactacggttctttcgactacggtcgtaactacggcgttgcttacgacatcggcgcatggaccgacgttctgccagagtttggtggcgatacctggactcagactgacgtcttcatgactggccgtactactggtgttgccacctaccgtaacactgacttctttggcctggttgaaggtctgaactttgccgcgcagtaccagggcaaaaacgaccgtgacggcgcgtacgagtctaacggcgacggtttcggtctgtccgcaacgtatgagtacgaaggttttggcgtaggtgcggcctatgcgaagtctgaccgtactaacaaccaggtgaaagcagcgagcaacctgaatgctgcgggtaaaaacgctgaagtctgggctgctggtctgaaatatgatgcgaacaacatctacctggcgaccacctactccgaaacgctgaacatgaccaccttcggtgaagatgcagcgggtgatgcgtttatcgcgaataaaacccagaacttcgaagcggttgctcagtatcagttcgacttcggtctgcgtccgtccatcgcttacctgaaatccaaaggtaaaaacctgggtacttacggcgaccaggatctggttgagtacatcgatgttggcgcaacctactacttcaacaaaaacatgtccaccttcgttgattacaaaatcaacctgctggacgacagcgacttcaccaaagcggctaaagtgtctaccgacaacatcgttgctgttggtctgaactaccagttctaa

SEQ ID NO: 8 - DNA, 1137 bp, Salmonella typhimurium
ttagaactggtaaaccagacccagcgctacgatgtcgtcggtgttgatgcccgcatcgcgggtaaagtcgtttttatccagcaggttgattttgtaatcaacataggtggacatgtttttgttgaagtagtaagtcgcgccgacatcaacgtattttacgatgtcctggtcgccatagctggcgccgtaaccgttgctgatgtccttacctttagactgcaggtaagccacagacggacgcagaccaaagtcgaactggtactgagcaaccacttcaaagttctgcgctttgttggcaaaaccgtaagaggtggacgggttgctaccgttagaggtaccaaaacgggttgcgttataggtctgagaatactgcgctgccagatagatgttgttcgcatcgtatttcaggccgccggtgtaaaccgtggcgcgatcgccgttaccatacaggcgagcgttagcggtgttgttctgatcggcagtacgtttagacgtggtgatagcgccaccgacagagaagccttcgccgattgcataagtcagcgatccgccgtaaccgtcgccgttctggttcagcaggctgcgaccgttggtgttttcaccgctcacgctgccgtttttgccctgatactgtaacgcgaagtccagaccatccaccaggccgaagaagtcggtgttacggtaggtagcatagccgttaccacgctgctgcataaagttgtcagcgccgtaggtgtcgccgccgaactccggcagaacgtcggtccaggaggtcacgtcataggttacgccgtagttacgaccataatcgaaggaacctgcatcagcgaatttcagacccgcaaacgccacacgcgtccaggagtcgttgctgccttcagtctggttgccctgaatctgatattcccactggccataaccggtcagctgatcgttaacctgcgtttcgcctttgaagccgatacgcatgtaggtctggtcgccatcgctgcctttgtcgtcagagaagtagtgcaggccatcaactttaccaaacaggtctaatttgttgccgtctttattataaatttcagccgcattcgctgcgcccgccaccagcagagctggtaccaggagggacagtactttaactttcat

SEQ ID NO: 9 - DNA, 1332 bp, Salmonella typhimurium
ttaacggccgtagcctttcaggttcgccttcttcaatgcagactcatactgactggacatcatcagagtttgcacttgagccataaagtccataatcacgacaacaacgataagcagtgaggtcccaccgaagtagaacggcactttcattgcatcacgcatgaactccgggatcaggcagataaaggtaatatacagcgcaccaaccagggtcaggcgggtcattactttatcgatatacttcgccgtttgctctcccggacgaattcctggtacaaatgcaccggacttcttcaggttatctgctgtttcacgcgggttgaaaaccaacgccgtgtagaagaaacagaagaagatgattgcagacgcatagagtaacacataaagcggttgcccaggctgcaaatacagcgaaattgttgtcagccagttccaaccagtaccgcccccgaaccatgacgcgatggtcgccgggaacagaataatactggaagcgaagattgccgggattacccccgccatattcactttcagcggtaaatgtgtgctctgtgcagcatagacacgacgaccttgctgacgtttggcgtagtttaccacaatacggcgttgaccacgttcaacgaatactacaaagaacgtcactgcaaatactaatactgcaaccaacagcaacacgaggaagtgcaggtcgccttgacgcgcttgctcgatagtatgggcaatggctggcgggagtcccgcaacgataccagcgaagatgatgattgagataccgttaccgataccgcgctcagtaatctgttcgccgagccacatcaggaacatggttcctgtaaccagactgacaacagcggtgaaatagaatgcaaagcctggattcatcaccaggccctgcataccaggcatattcggcaaaccggtagcaataccgatcgactggaatatcgccagcaccagagtaccgtaacgggtgtactggctgatcttacgacgaccagactccccttctttcttaatttctgccagcgttggatgaaccaccgtcaacagctggataatgatcgacgccgaaatatacggcatgatccccagggcaaagatagaagcacggctgagagcaccaccagagaacatgttaaacatttcaatgatggtgcctcgctgttgctcaagcagtttggcaagtacagcggcatcaataccagggatcggaataaaagagccaatacggaacacaatcagcgcgccgataacaaacagcagtctgcgtttcagctcacctaagccacctttggcactttgaaaatctaatcccggttgtttagccat

SEQ ID NO: 10 - DNA, 2664 bp, Salmonella typhimurium
atgtcagaacgtttccaaaatgacgtggatccgatcgaaactcgcgactggctacaggcgatcgaatcggtcatccgtgaagaaggtgttgagcgcgctcagtatctgattgaccaactgctttctgaagctcgtaaaggcggcgtgaaagtcgcggcaggcgcaggggccagtaattacatcaacactattgccgttgaagacgaaccggaatacccgggtaatctggagctggaacgtcgcattcgttctgcgatccgctggaacgccatcatgaccgtgctgcgcgcgtctaaaaaagaccttgagttgggcggccacatggcgtccttccagtcttccgccacgatctatgatgtctgttttaaccatttcttccgtgcgcgcaacgaacaggatggcggcgacctggtgtacttccagggccacatctctccgggcatctacgctcgcgcgttcctggaaggtcgtctgacccaggaacagatggataacttccgtcaggaagttcacggcaatggcctctcttcctatccgcacccgaaactgatgccggaattctggcagttcccgaccgtctctatgggtctgggcccaatcggtgctatctaccaggcgaaattcctgaaatatctggaacaccgcggcctgaaagatacctctaaacaaaccgtttacgccttcctcggcgacggcgagatggatgagccggaatccaaaggcgcgatcaccatcgccacccgtgaaaaactggacaacctggtctttgttatcaactgtaacctgcagcgtcttgacggcccggtcaccggtaacggcaagattgttaacgaactggaaggcatctttgcaggtgctggctggaacgttatcaaagtcatgtggggcggtcgttgggatgaactgctgcgtaaagacaccagcggtaagcttatccagctgatgaacgaaaccgttgacggcgactaccagaccttcaaatccaaagacggcgcttacgtgcgtgagcacttcttcggtaaatacccggaaaccgcagccctggtggccgactggaccgatgagcagatttgggcgctgaaccgcggtggtcacgatccgaagaaagtctatgctgcactgaaaaaagcgcaggaaaccaaaggcaaagcgaccgtaatcctggcccataccattaaaggttacggcatgggcgacaccgcggaaggcaaaaacatcgctcaccaggtgaagaaaatgaacatggacggcgtgcgttacgtccgcgatcgtttcaacgtgccggttgccgatgctgatctcgaaaaactgccatacattaccttcccggaaggttctgaagaacacaaatacctgcatgaacgccgtcaggcgctgcatggctacctgccaagccgtcagccgaacttcaccgagaagttagagctgcctcaactttcagatttcggcgcgctgctggaagagcaaagtaaagagatttccactacgatcgctttcgtgcgtgccctgaacgtgatgctgaagaacaagtcgatcaaagatcgtctggttccgatcatcgccgacgaagcgcgtactttcggtatggaaggtctgttccgtcagattggtatctacagcccgaacggccagcagtacaccccgcaggaccgtgagcaggttgcttactacaaagaagacgagaaaggccagattctgcaggaaggtatcaacgagctgggcgcaggcgcatcctggctggctgcggcgacctcttacagcaccaacgatctgccgatgatcccgttctacatctactactctatgttcgggttccagcgtatcggcgacctgtgctggcaggctggcgaccagcaggctcgcggcttcctgatcggcgggacttccggtcgtactacgctgaacggcgaaggtctgcagcacgaagatggtcacagccacattcagtcgctgactatcccgaactgtatctcttacgacccggcttacgcttacgaagtggctgtcatcatgcatgatggtctggagcgtatgtacggtgagaaacaagagaacgtttactactacatcaccacgctgaacgaaaactaccacatgccggccatgccagcaggtgccgaggaaggtatccgtaaaggtatctacaaactcgaaaccctcgaaggtagcaaaggtaaagttcagctgctgggctccggttctatcctgcgtcacgtgcgtgaagcagcacagatcctggcgaaagattacggcgtaggttctgacgtatatagcgtgacctccttcaccgaactggcgcgtgatggtcaggattgtgaacgctggaacatgctgcacccgctggaaaccccgcgcgttccgtacatcgctcaggtgatgaacgacgctccggctgtagcatctactgactatatgaaactgttcgccgagcaggttcgtacttacgtaccggctgacgactatcgcgtactgggtacggatggcttcggccgttccgacagccgtgagaacctgcgtcaccacttcgaagttgatgcttcttatgtggttgttgcagcgctgggcgaactggctaaacgtggcgaaatcgacaagaaagtggtagcggatgcgattaccaaattcaacatcgatgcagataaagttaacccgcgtctggcgtaa

SEQ ID NO: 11 - DNA, 792 bp, Salmonella typhimurium
ttagtgaaagctgtgttcttcgcccggataaacgccggactccacttcagccatatactgctgtacggcggcgcgcatgtcgcccgcttcggcgaggaaatttttcgcgaattttggaatatgaccgccggtgatgccaaacgcatcgtgcatcaccaggatctgaccgtcggtgacgttgcccgcgccgatgccgatcaccggaatcgacagcgcttccgtgacgcgcttcgccagctcaaccggcacgcactccagcaccagcagttgagcgccagcggcttctaaagccagcgcgtcatccagcagcacttgtcctgcatctccacggccctgaattttatagccgccgaagatattcaccgactggggcgttaaccccagatgaccacaaaccggcacggcgcgttcggtgagcattttcaccgtatcaaccagccaggcgccgccttcaattttgaccatattggcccccgcacgcatcacgatagccgcgttttcacatgcctgttccggggtggcgtaagccataaacggcaggtcggagagcaatagacagttgggcgcgccgcggcgtaccgcgcgggtgtggtaggcgatatcttccacggtgacaggcagggtggagtcgtgcccctgaattgtcatgcccagagagtcgccaaccagcatcacattgataccttcgtcggcaaataacttagcgaagctgtagtcgtaggcggtaattgtcgcgaagcgttttttctcttgcttgcatttctgcagcagtgaaatggtggtgggtttcat

SEQ ID NO: 12 - DNA, 423 bp, Salmonella typhimurium
atgattgccatctcccggacggtctccatagccgataatgagctggaaattacggccattcgtgcgcagggcgcgggtggtcagcacgtaaataagacctctagcgcgattcatttgcgctttgacattcgggcctctggcctgccagagtattataaacagcgtttgctgacggccagccaccatctgataagcgatgatggcgtcattatcattaaggcgcaggagttccggagccaggagctcaaccgggaagcggctatcgccaggctggttgccgtcataaaagaattaaccgcggagcagaaaagccgtcgcgcaacccgtccgacgcgtgcctcgaaagagcgccgtttgtcctcaaaggcgcaaaaatcttctgtaaaggcgcttcgcggcaaagttcgtcgtccactggattga

SEQ ID NO: 13 - DNA, 2640 bp, Salmonella typhimurium
atggaaactcctgtttcacgcagtgcgttgtatggaaaactggccggcccactattccggtcgctggaatcggcaacggcattttgcaaactacgctctaatccctgggttgagctgactcactggctgcaccagttaacacagcagcccgataacgatattctccacgttcttcggcattaccagatccctctttctgatgtggagaaagcgttactccggcaactggatatgctgcccgccggggccagcgccattagtgatttttctcaccatatcgatctcagcgttgaaaaggcctggatgctggcgagcgtccgttacggcgataacaaaattcgcagcggctggttgctgctggccttgttgaccacgccagaactgcgtcgggtactgagcagtatctgcgcgccgctggccacgcttccggttgatgaactgacggaaatactgccctcgttgatcgaaacatcgccggaagcgcaggagcgcccttacgacggctccggcctggcatcagccattcccggtgaaagcagtcaggcgattcccaacggcgggcaggacggtaaatccgcgctggcaaaatactgtcaggacatgacggcacaggcgcgcgacggcaaaatcgacccggtgacggggcgtgagcatgaaatccgcaccatgacggatattctgctgcgccgtcgccagaataatccactactgactggtgaggcgggcgtcgggaaaacggcggtcgtcgaaggttttgccctcgcgattgcgcagggggaagtgccgcccgcgctgcgggaagtacggctactggcgctggacgttggcgctctgttggccggagccagcatgaaaggcgagtttgaatcgcgtctgaaagggttactggaagaggccgggcgctcgccgcagccggttattctgtttgtcgatgaagttcacactctggtgggcgcgggcggcgcatccggcacgggcgatgccgctaacctgctgaaaccggcgctggcgcgcggcaccctgcggactatcggcgccaccacctggagcgaatacaagcgccatattgagaaagatccggcgctgacccgtcgttttcaggtgttgcagattgccgaaccggaagagatccccgcaatggaaatggtgcgtggtctggtggatacgctggaaaaacaccataacgtactgattctggatgaggcggtacgtgcggcggtacagctttctcaccgctacattcccgcccggcagttgccggataaggccatcagcctgctggataccgccgcggcccgcgtggcgctgacgctgcacacgccgcctgccagcgtacagttcctgcgccagcagctaaaagcggcggaaatggaacggtcgctgttgcagaagcaggaaaaaatggggattcagtcagatgagcggcgcgatgcgctgatggcgcgaattttctcgctcaacaatgaactgactgcatccgaatcccgctggcagcgggagctggaactggtacatacgttgcaggaactgcgtctcgcagagtctgatgctgatgacaaaaccacgctgcaacaggccgaaacggcgctaagggagtggcagggcgacgcgccggtggtgttcccggaagtcagcgcggcggttgtcgcggcgattgtcgccgactggaccggtattcctgctgggcgcatggtgaaagatgaggccagccaggtgctggaactgcctgcccgactggcgcaacgcgttaccgggcaagacggcgcgctggcgcagattggtgaacgtattcagaccgccagggcgggactgggcgatccacgcaaaccggtgggcgtgtttatgctggccgggccgtccggtgtcggtaaaaccgaaaccgcgctggcgctggcggaggctatctacggcggcgagcagaacctggtaaccatcaatatgagcgagttccaggaggctcacaccgtttccacgctgaaaggcgcgccgcccggctatgtgggctatggcgagggtggtgtgctgacggaagcggtgcgtcgccacccctggagcgtagtgctgctcgacgagatcgaaaaagcgcaccatgacgtccacgaactcttctatcaggtgtttgacaagggtgggatggaggacggcgagggtacacatgtcgatttcaaaaacaccacgctattactcaccaccaacgtgggttccgacctcatcagccagatgtgtgaagatccggccttaatgcccgatgctacggggcttaaagaggcgctaatgccggaattgcgcaagcatttcccggcggcatttctgggccgcgtgacggtgatcccttacctgccgctggacgaaacgtcgcgtggcgtgattgcccgtctgcaccttgaccggctggtggcgcggatgagtgaacagcacggcgtgacgctgacgtatagcgaggaactggtcgcacatattgtggcgtgctgtccaatgcatgaaacgggcgcgcggttgctgattggctacatcgaacagcacattctgccacgactgtcgcgctactggttgcaggccatgacggaaaaagccgcgatcaggcagattgatatcggcgttaatggtgatgagcagattgtttttgagatcgtttgctga

SEQ ID NO: 14 - DNA, 1611 bp, Salmonella typhimurium
atgcgtatacctttcacccgttggccggatgaatttgcccgccgttatcgtgaaaaaggctactggcaagacgtgccgttgaccgatattctgacccgccacgctgacagcgacaagacggcggtcattgaaggcgagcgcgcattcagctatcgccagctcaaccaggccgcagataatctggcctgcagtttacgccgtcagggcatcaaacctggcgaaaccgctctggtacaactggggaatgtaccggaactgtatatcacctttttcgccctgttgaagcttggcgtagcgcccgttctggcgctgtttagccatcaacgtaccgaacttaacgcctatgcgatgcagatcgcgccgacgctggtgattgccgatcgccaacatacgctgttcgccggggaggactttctcaacacgtttgtggctgaacaccgctctgtgcgggtggtgttattgcgcaacgacgacggcgatcacagcctggacgcggcgatgcggcaggcggcggaagatttcactgccacgccatcacctgctgacgaagtggcctactttcagctttccggcggtactaccggcacgccaaagcttattccccgtacccataacgactattactacagcgtgcgccgcagcaatgagatttgcggtttcaacgaggatacgcgttttctgtgcgcgattcccgccgcgcataactacgccatgagttcgccgggcgcgctgggcgtctttcttgccaaaggaacggtagtgctggcgaccgatcccagcgccacgctctgtttcccgctgatcgaaaaacaccagattaatgccacagcgctggtgccgcccgcggtcagtctatggctacaggctatccaggagtggggcggcaatgcgccgctggcgtcattaaggttattgcaggtcggcggcgcgcggctttctgcgacgctggccgcccgtattccggctgaaattggctgtcagttgcagcaggtcttcggtatggcggaagggttagtgaactatacccggctggacgatagtccggaacggattatcaatacccagggaagacccatgtgtccggacgacgaagtgtgggtggcggatgccgacgggaatccactgccgccgggcgagattggtcgtctgatgacgcgcggcccctatacttttcgcggctatttcaacagtccgctacacaatgccagcgcctttgacgccaacggtttttactgttccggcgatctgatctccattgatcaagacggttacatcaccgttcacgggcgtgaaaaagatcagatcaatcggggcggcgagaagatagccgccgaagagatagaaaacctgttactgcgccacccggtggtgatccatgcggcgctggtcagcatggaagatgaactgctgggagaaaaaagttgcgcatatctggtggtaaaagagccgctgcgagcggtacaggtacgccgtttcctgcgagagcagggcgtggcggaatttaaattaccggatcgcgtggagtgcgttgcgtcactgccgctgacgccggttggtaaagtcgataaaaaacaattacgccagcggttggcgtcacgttcaccgctctga

SEQ ID NO: 15 - DNA, 1284 bp, Salmonella typhimurium
ttaacgcttcagcgccgatttaaaatcgcgtttatcgtagccggtatacagctgacgaggacgggcgattttcatgccgtcagtgtgcatttcattccagtgtgcaatccagccaacggtacgcgccatggcgaagatcacggtgaacatggaggacggaatgcccatcgctttcagaatgatgccggagtagaagtctacgttcgggtacagtttcttctcgatgaagtacgggtcgttgagcgcaatgtgctcaagctccatcgccacttccagcagatcgtctttggtgcccagctctttcagcacttcgtggcaggtttcacgcatcacggtggcgcgcggatcgtagtttttgtaaacacggtgaccgaagcccatcaggcggaaagaatcattcttgtctttcgcacggcgaacaaattccggaatgtgtttaacagagctgatttcttccagcattttcagcgcggcttcgttggcgccgccgtgcgcgggtccccacagggaggcgatcccggcggcaatgcaggcgaatgggttggcgccgcttgaacctgcggtacgtaccgttgacgttgaggcgttctgctcatggtcagcgtgcaggatcagaatacggtccatcgcgcgctctagtaccggattcacttcataggtttcacacggcgtggagaacatcatgttcaggaagttaccggcgtaggaaaggtcgttgcgcggataaacaaacggctgaccgattgaatatttgtaacacatcgccgccatggtcggcattttggacagcaggcggaacgccgcgatttcacggtggcgcggattgttcacatccagcgagtcgtggtagaacgctgccagcgcgccagtgatcccgcacattaccgccatcggatgtgagtcgcgacggaaagcatggaacaggcgagtgatttgctcatggatcatcgtatggcgggtgactgtcgttctgaactcgtcatactcttcctgcgtcggtttttcgccgtacagcaggatgtaacagacttccagatagttggaatcggtagcaagctggtcaatcgggaaaccgcgatgcaacaaaatgccttcgtcgccgtcgatgaaggtgattttagattcgcaggatgcggtagaggtgaaaccagggtcaaaagtaaaaactccttttgaaccgagactacgaatatcaataacatcttgaccgagtgtaccttttagcacatccagttcaatagtagtgtcaccagtaagggtgatttttgcctttgtatcagccat

SEQ ID NO: 16 - DNA, 330 bp, Salmonella typhimurium
ctgaataatgagcttcattttgtccggcaactggcccgggagttccggcggcctgactggcgccggatgctggacgaaatgagttcaactgaacttagtgagtgggctgatttctttcgggaaaacagtttcagtgatgccctgctggatgcggagttttccacgctgaaagcgcaggtgttcatgctggtgacggggaaagaaatcgatgcagcggacttcagtttgctgacattacccggagcggtacagagcatgacggagcaggatctgcttgaagtggcagtcggtattccgggaggagtgagatttgagccagaaagtcggtga

SEQ ID NO: 17 - DNA, 996 bp, Salmonella typhimurium
ttatttggagatgtgagcaatcaggtccagtactttgttggagtaaccggtttcgttatcgtaccaggagaccagtttcacgaagttgtcgttcagcgcgatgcctgctttagcatcgaacacggaagtgcatacttcaccgttgaaatcggtagatacaacgtcgtcttcggtgtaacccagcacgcctttcatttcgccttcggcagcagctttaacagcagctttgatctgctcgtaggtagccgctttttccagacgaacggtcaggtcaacaacggatacgttcggagtaggaacgcggaacgccataccagtcagtttgccattcagttccggcagtactttacctaccgctttagcagcgccagtagaggacgggatgatgttctgagatgcgccgcggccgccgcgccagtctttgtgagacgggccgtcaacggttttctgggttgcggtagtcgcgtgaacagtagtcatcagaccttcgatgatgccgaagttgtcgttgataactttagccagcggcgccaggcagttggtggtgcaggaagcgttggaaacgatgtcctggccttcgtatttgtcaaagttagcgcctttaacaaacattggggtgttgtctttagacggacccgtcagaaccacttttttcgcgccagcggtgatgtgtttacgcgcggtttcgtcagtcaggaagataccggtagcttcagccactacgtcaacaccaacttcgtcccatttcaggttagccggatcgcgttcagcggtaacacggatttttttaccgttaacgatcagatgaccgtctttcacttcaacagtaccgtcgaaacggccgtgagtggagtcatatttcagcatgtatgccatgtactctgcgtctaacaggtcgttgattgcaacgatctcgatgtcagaacgtttctgagcagcacggaaaacaatgcgaccgatacggccaaaaccgttgatacctactttgatagtcat

SEQ ID NO: 18 - DNA, 2679 bp, Salmonella typhimurium
atggctgttactaatgtcgctgaacttaacgcactcgtagagcgtgtaaaaaaagcccagcgtgaatatgccagtttcactcaagaacaggtcgacaaaatcttccgcgccgccgctctggctgccgctgatgcccgcattccgctggccaaaatggccgtcgccgaatccggtatgggtatcgtggaagacaaagtgattaaaaaccacttcgcttctgaatatatttacaacgcctataaagatgaaaaaacctgcggcgtgctgtctgaagacgacaccttcgggaccatcaccattgctgaacctatcggcattatttgcggtatcgttccaaccactaacccaacctctaccgcgatcttcaaatcgctgattagcctgaagacccgtaacgccatcatcttttctccgcatccgcgcgctaaagaagcaaccaacaaagcggcagacatcgttctgcaagcggctatcgctgccggcgcgccgaaagatctgattggctggatcgatcaaccttccgtagaactgtctaacgcgttgatgcaccacccggatattaacctgatcctcgccactggcggtccaggcatggttaaagctgcatacagctccggtaaaccggctatcggcgtaggcgcaggcaacactccggttgtcattgatgaaaccgctgatatcaaacgcgctgtggcgtctgttctgatgtctaaaaccttcgataacggcgtaatctgtgcttctgaacagtctgttgtcgttgttgattccgtctatgatgccgttcgcgaacgtttcgccagccatggcggctacatgctgcagggccaggagctgaaagcggttcaaaacgttatcctgaaaaatggcgctctgaacgccgctatcgtcggccagccagcctacaaaatcgctgaactggcaggcttctccgtaccagaaaccaccaagattctgatcggtgaagttacggtcgttgacgaaagcgaaccgttcgcacacgaaaaactgtctccgactctggcgatgtatcgtgcgaaagatttcgaagaagcggtagaaaaagcagaaaaactggtcgctatgggcggtatcggtcacacctcctgcctgtacactgaccaggataaccagccagaacgcgttgcttacttcggtcagatgatgaaaaccgcgcgtatcctgatcaacaccccggcctctcagggtggtatcggtgacctgtacaacttcaaactcgcaccttccctgacgttgggttgtggttcctggggtggtaactccatctctgaaaacgttggtccgaaacacctgatcaacaagaaaaccgttgctaagcgagctgaaaacatgttgtggcacaaacttccgaaatctatctacttccgccgtggctctctgcccatcgcgctggatgaagtgattactgatggccacaaacgtgcgctcatcgtgactgaccgcttcctgttcaacaacggctatgcagaccagatcacctctgtgctgaaagcggctggcgttgaaaccgaagtcttcttcgaagttgaagcagacccgacgctttccgttgttcgcaaaggcgctgagctggctaactccttcaaaccggacgtgatcatcgcgctgggcggcggttccccgatggacgccgcgaaaatcatgtgggtcatgtacgaacatccggaaactcacttcgaagaactggcgctgcgctttatggacatccgtaaacgtatctacaagttcccgaaaatgggcgtgaaagcgaaaatgatcgccgtcaccaccacttccggtaccggttctgaagtcacaccgtttgcggttgtgaccgacgatgcaaccggtcagaaatatccgctggctgactacgccctgaccccggatatggcgattgtcgacgccaacctggtgatggatatgccgaagtccctgtgtgcgttcggtggtctggatgcggtaactcacgctctggaagcttatgtttccgtactggcttctgagttctctgacggtcaggctctgcaggctctgaaactgctgaaagaaaacctgccggcgtcttaccacgaaggttccaagaacccggttgcgcgtgaacgtgttcacagcgccgcgactatcgccggtatcgcgtttgccaacgccttcctcggtgtatgtcactccatggcgcacaaactgggctctcagttccacattccgcacggtctggcgaacgccctgctgatttgtaacgttatccgctacaacgcgaatgacaacccgaccaagcagaccgctttcagccagtacgatcgtccgcaggcacgccgtcgttacgctgaaattgctgaccacctgggcctgagcgcgccgggcgaccgtaccgctgctaagattgaaaaactgctggcatggctggaaagcattaaagctgagctgggtattcctaagtctatccgtgaagcaggcgtacaggaagctgacttcctggcacacgttgacaaactgtctgaagatgccttcgatgaccagtgcaccggcgctaacccgcgttatccactgatctccgaactgaaacagattctgctggatacctactacggtcgtgatttcaccgaaggtgaagttgcagcgaagaaagacgtcgttgccgcaccgaaagcagagaaaaaagcgaaaaaatccgcttaa

SEQ ID NO: 19 - DNA, 1224 bp, Salmonella typhimurium
tcatccccgaatatctgcaataaattggcgtagcacgttctctttattgagcgtgcgttcggcgtattcacgtgccgtcgtgttgtttttcggcatggcgagcgcctggctaatcccgttgaccagcgcgtcggtcgactccggttccacgcaaacggcgatgcccggatagcgcgcgcaaagttgtcctaattcggtgtgcggctcagcggtaatcaccgcattaccgccgaccgccagaatgttagtcagcttggagggcagtaccgcatccgccgcgccgcgcttttgcaccaccagatggcagtcgcccattttcagcagcgcgggtaaggcgtcgtaaggctgcagcgggaggaatttaatatttgccaggccgcgttcgcgggccatgttctccagccgcgccttgccgcccccctggccgacaatcgcaaaaatcaacggtcgatcgcgtaatcgttccgcggcgtcaattaccttttccagcccttgcttttcgccgatattgccggaatagagcacaatttttttgccctctggcaagccaagctgctgacgcaaagccgtcacgtcagcgtcattaacgtcctgaaagcgcgccacttccgaccagttcggaaaaaagaggattttttccgccgcgacgcccttttcccgcgctttattcatcatggagcgagagatggtcgaaacattatcaacgttacgcagcgcgctgcgttcaaaggccgtcgctaaccgcgctacgctgccgcgcttgccttttcccgccattcctaagccgagcatggcgtccacttcgtaatcctgaatatgcagtacggtacgcgcgccggagagtgtcgccagcagacgcattcccggcgtacaaaagagcgtcggtacaacgccgataatccgatccggcttccagcgacgctgcgccatcagtgggaaaaaactgctcaatgcaaagctccccagatgaagcagtcgttttaaggtggagggctgtttcggcacatacagcgggcagcgccagacggtagcctcgccctcttcccggcgatagcgccaggcggaatagcgctcaccgaccttccactgcgggtagtacggcggcgcagtaatgacccgcacctcatggccttcctgcgccatccacgccaccatttcgccggtatatttgccgataccggtcagttccggcgaatagttaatgccatagaccaggatcttcat

SEQ ID NO: 20 - DNA, 1140 bp, Salmonella typhimurium
ttaccaggaatgaatgtcgctggccgtatccgtcatataacggacaccgctaatggttggcagcaactgattgatcagacggttccagcgagcaaccggcgcggtcgtgacgtacaccacatcgtaaggctgaagtcggaattccgtcgccatcaccaatgacgtggcgtcagacatatcaagctggtagatattggcgatcttgccgccgcgtcccccctcgcctttcaacggacgaatcacaaaaatgccgctggcgttggaggtggtcagatcaatgccttccgcattgcctaatgcttcggtgagcgtcatgccgctgaaatccattttgagggtgctctgttttttcacttcgcccatgacaaagactttcagatcgtcattgcgcggcacatacagaatgtcgccagggtagagcaagcggttctggctaagatcgccattttgcatcagcgcctgtagcgaaatgcgctgttctttgccgttgtgcgtcaacacgacgttgcgccagtccgccatatcggtcaggccgcccgcagcgttaatcgcatccaggacggttagcggtacgttagtaatagcctgctgaccggatttattcacctggccggagatgtacgctttttgcgagcggaaagcggcgatattgacatccacctgcgggtccgcaatgtacttcgctaaacgcccggtaatatcgctacgaatctctgacaaagttttaccgacgacgctaaccttgccaatgtagggataaaacatggtgccgtccggctgtacccagttgccggtatcgcttgagctacggtactggcctgctggcgtggtcaattccgggtgatcccagacggtgacattcagcacatcgccaggcccgacgcgatactgatagctggcgatctcctggtccagcgacatattcggttgcgcgacattgggccgcgggcgtaattgctcaaccaaccgtggcgtcagcggatacacattgaccatccggtcgagatcaaagtcagcgtcttgctgtttgatcacatctttccccatcgtagacatattgctgcccggaagtactgtgcaaccacttatcaagctgagcgacgccaataatggcatcaatttcattttggatttcatcat

SEQ ID NO: 21 - DNA, 399 bp, Salmonella typhimurium
atgagtaagtcactgaatattatctggcaatatatacgcgcttttgtattgatttatgcctgtttgtacgcaggcatttttcttgcatcactgcttcctatcactattcccggcagcattatcgggatgttaattctgtttgtattgctggcgctgcaaattctgccggcaaagtgggttaaccccggctgttatgtgctgattcgttatatggcgttgctgtttgtgccaattggcgttggggtcatgcaatattttgacttactgcgcgcgcaattcggcccggtggtggtctcttgcgctatcagtacgctggtcgtttttgtggtcgtaagctggagttcacatctgatacacggtgagcgtaaagtggttgggcagaagggaacgaaaaaatga

SEQ ID NO: 22 - DNA, 1071 bp, Salmonella typhimurium
ttagtcatttttttgcaggaacatgaccgccttatccgggaagtcagtgaacagcccgtcgacgcccgccttgttatacaggatgtcgtacaactgattgacgtctgtggcatagtccggcaattgatcggcacgcacagtgtaaggatgcactaccatcttattctgatgcgcgtcttgcaccattccagtcagcttgatattccctttcgttgagccttccgcaaccagcatatggtaatccggaccaataccgtccgcatattccgccacctgcttcatagcgcccggcttaaacatccagtcgtagttgtaatttacccaacgaccgtccggctgtttctgctgtgtttcattccagtcggtatacgcaataagttgaaccagattgagatccatccccattttgggttccagttcattcttaatacgtttcagctcagcgacatcaaaacactgcaaatagacattgtcctgcttgccggtgtaaccatacttcttcagcacttccagcgttttcgcggcaatatctttcccttcctgatgatggaaccacggcgctttaatttccggataaataccgatatttttaccggtagagtgatttaatccctgaacgaattcaatttcctcttcaaaggtatgaatgcggaaatcagattttcccatcgggaaacggcccggataagtttgtacttttttgccgttttcaatatcaaacccttcggtaaacttcagggatttaatttcatccagcgtaaaatcgatagcgtaatagcgcccatctttacgcgcccggtccggaaaacggtcagcgacgtcagtcacccggtcaaggtagtggtcatggaggacgaccagatggtcgtcctttgtcatcactaaatcctgttccagataatctgccccttgcgcatacgccatcgctttcgccggtagcgtatgctccggcagataaccgctggcaccacggtgggcgataacgactttttcagccgccacggcgccgcttccgatggtcattcctgccaacattaacgccacgctaaggtttttcagtgtggttttcat

SEQ ID NO: 23 - DNA, 1002 bp, Salmonella typhimurium
atggacaattttcagaaagatattgatgacagggccaatttaaccctgtccaaccgttttgaactgctgttattccgtcttggtacatcgctgcatgaacagaagtcagagctgttcggcatcaatgtatttaagctgcgcgaaatcgtaccaatgcccgcctttacgcgcccggcaggcatgaaagcgccgctattgggcatggtcaatattcgggatcaggtcattccggtgattgatttgccagcggtagcgggctgcaagccggaaaccgggctgaatattttgctgatcaccgaatatgcgcgcagcgtacaggcatttgccgtcgagtcggtggaaaatattatgcgtcttgactggcaacaggtgcataccgccgagaaagccgtcaacggtcgctacatcaccagtattgcctgcctggatgacaacaaagaaaccaacaacctggcgctggtgctcgacgttgagcagatcctttatgatattgtcccctccagccacgatctgcgcgccaccaatctgaagaccaataaattttatattaccccaggcgcggtagccattgtggcggaagactccaaagtcgcccgcgcgatgctggaaaaagggctgaacgcgatgggaattccgcatcagatgcatgtgaccggcaaggatgcctgggagagaatccagcaactggcgcaggaagcggaggccgaaggtaagccaattagcgagaaaatcgcgctggtcctgacagatcttgagatgccggagatggatggctttacgttaacgcgtaaaattaaaaccgatgaacggctgaaaaagatcccggtcgttatccactcctcgctttccggcagcgccaatgaagatcatatacgtaaggtgaaggccgacggctacgtggctaagtttgagattaacgaactctcttcggtcattcaggaagtgctggagcgcgcagcaacaaacagccagggaccactgatcagccgcaaaagcgcctga

SEQ ID NO: 24 - DNA, 909 bp, Salmonella typhimurium
ctattcatccgtgcccccgttggtaacgctccattcggtacaggatgccgcctgtgtcttatccagcaccacatcctccagaggggacgtcagctccacacgctggacgccctccacgtgcaacgcggcataaatggcgctgcggcggatatcacgtcccagccgcgtctgactggcgatgtacctctgcagactggcttttgccgccaccataacaggctccgcttccggccctggataaagaaaaatggtagcctccacccggtacggtatgatctccgcactacgaaccgtcagacggtcagccaccgggcgtacactctcactgttcagggctttttcaaccacatccagcaggtcttttactgctgtaccgtcaccctcacggctcagcacggtaagtaccacctctgcaggggccggactggttgcgctggcatctgccacacgtccgtccgcacttctggcgtgaaattcataggctcccgtagggccagcaacggacagtccctcaaatgctgcagggatgcgctggcgcagcgcctcatcatcttccatcactgcggtgaccggcggtactgcatcattatcagcaggaactaccgtcagacgtttcacgttgcagttggctgccagctgctcaagatcatttcccatcgaataggccaccatcaccgcctgcgcagcctcgttaatacgctggcgcagcaggatttcgcggtatgtgctttcctgcagcagcttggtgacgggttcagattccagcgccagcgtgcgccgcaccgcgtcctgttcatccacaggataaagagccacaaaagcggccttgcgctcagccagcagcgtctcaaaatccggcacgtccactatctgtggcggcggtaaccgggaaaggtcaatgactgccat

SEQ ID NO: 25 - DNA, 654 bp, Salmonella typhimurium
ttagcggctgtcattgcgcagtctgcgctccagctgctgcttttcttttttcacaccgcagcggggatcgagctgcagcgcatgggtaaggtgattcagggcagacgccggattgctttcgctcagtacagcgccgatggctttatgcaggcgcgcccgcgactggtccggcatatccagatcagttgtcaggtccagcgtctgcagaagcagatcggcatcaaaaccggcagcggccagcagagcgctttgcgccgcgtctgccatttcttctgccagcacggtctgcacgttacggttgcccagcggcatcacccagccatggcgcagcgcatgacgcccgatttccagcgcaccggcataatcaccggcatcgatacgccacagcatcacgtacatcagcacgtcatcctgctgcgcacctccggcagccagcacgccctccgcccaggcggaatatttcggcagcagctccaccttgatttccgcctttttcaccgtggactggatgcctttaaggcgacggcgatcttctgccagttgcagcagcatcaggtcatagccagacgcatggcggcgaacactgccgccctcacgggcggcctgttcggcctgaatgcgcaggcggtgctgccgtgcgggactcaggctcat

SEQ ID NO: 26 - DNA, 546 bp, Salmonella typhimurium
tcagaaaagcagcgatgccgttgaatccagcgccgcgcgacggcgtttttccgcgctcagctgttcaagcttattgcggtccacgcagattagggcgtgcgttgggcaagcggccatacaggccggaccggcttcacggtggtgacacagatcgcacttgttggcttcggctttttcggcacgcacgttcagccccgcgccgctattgcgaaccaccggacgtaccaccacttccatggcgccgtaaggacatgccactacgcaagttttacagccaatgcagcgttcctgcatcacatgaacaaagcctttgtcacggctgatggcgccattcgggcaaacgttggcgcacggcgcgtcttcacactggcgacacagcgttgccgtggaaacgttcacgcctttgatgacatggatacgaggtaaaaaggtttcaggggtcagcgatgcgcaatcctgattttcctgatgggatacgacgcaagccacttcacaggtacggcaaccaatgcacttactcgcgtctgcaatgatgaaacggttcat

SEQ ID NO: 27 - DNA, 411 bp, Salmonella typhimurium
tcagtcacgaagcctcctcaccatcagatagatggcgctttcctgatgaatgtcatacagcatactgagcatcagtttgctccattcttgctgctgcggggtctgcgcggcgcgcgcctcatcaaacgcgcgcgccagcatttgaacatggttgaaatcgatgacgatctcgccatacttcggcacgccttccattttacgccgggcatcgctaccggcttccagggtggcgatccacgccagatactcatcccatgggcaggtgagtgcggcctccagacaatcgataacccccaggtggtgaccaatcgccaggctgtaatagacaacctgctgcgcctcggcaggcgtcgcatcgttctcatcaataaacttacggctcagttgactgaacaccacctgttcgctcat

SEQ ID NO: 28 - DNA, 873 bp, Salmonella typhimurium
atgtgtacgacttgcggttgcgctgaaggcaacctttatatagaaggcgatgaacataatccgcactcagcgtttcgtagcgcgccctttgccccagcggctcgcccggcgctgaatattaccggcattaaaacgcctgactttgccccaagtcagaccgcagaaggcgatctgcattacggccacggcgaagccggaacccacgcgcctggtatgagtcagcggcggatgcttgaggttgaaatcgacgtgctggacaaaaataatcgtctggctgagcgcaaccgcgcccgtttcgccgcccgccagcaactggtgctcaacctggtgtccagccccgggtccggtaaaaccaccttgctgactgaaacgctgatgaaattgaaagaccgtgtaccgtgcgcggtgattgaaggcgaccagcagacagtgaacgacgccgcccgcatccgcgctaccggcacgcccgccattcaggtcaacaccggtaaaggctgccatcttgacgcgcaaatgatcgccgacgccgcgccgcgcctgccgctggatgaccatggtattctgtttatcgaaaacgtcggtaatcttgtctgcccggccagcttcgatctgggcgaaaagcataaagtcgcagtgctttccgtgaccgaaggtgaagataagccgctgaaatatccccatatgtttgccgctgcgtcgctcatgctgctcaataaagtcgatctgctgccctacctcaattttgacgttgagaagtgcatcgccagcgcgcgtgaagtgaacccggagattgaaattatcctgatttccgccaccagcggcgaaggcatggatcagtggctggcctggctggaggcgcagcgatgtgcatag

SEQ ID NO: 29 - DNA, 459 bp, Salmonella typhimurium
atgggggacgaaaagagcttagcgcacacccgatggaactgtaaatatcacatagttttcgcgcccaaataccgaagacaagcgttctatggagagaagcgtagggcagtaggcagcatattaagaaaattgtgtgaatggaaaaacgtacgaattctggaagcagaatgttgtgcagatcatattcacatgcttctggagatcccgccgaagatgagtgtgtcgagtttcatgggatatctgaagggtaaaagtagtctgatgctttacgagcagtttggggatctaaaattcaaatacaggaacagggagttctggtgcagagggtactatgtcgatacggtgggtaagaacacggcgaagatacaggactacataaagcaccagcttgaagaggataaaatgggtgagcaattatcgatcccgtatccgggcagcccgtttacgggccgtaagtaa

SEQ ID NO: 30 - DNA, 1302 bp, Salmonella typhimurium
ttacagcataaagctgcccagcaggaagccgaagcagacagccagaacgacgcccagggtgcctgggatgaagaacgggtggttaaagacgaatttaccgatacgggttgtaccggtgtcatccatctgtaccgctgcaaccagagtcgggtaggtcggcaaaatgaacaggccggaaacggcggcgaaggaagcgactgccgtcagcggagagacgttcagcgccagcgccatcggcatcagcgctttcgccgttgccgcctgagagtagagcagcgcggaagcaaagaagaagatgacggccagcagccacggatgaccctggatgacgctacccgcagtgtctttgatccagtcgatgttagcggatacgaaagtatcgcccagccacgccacgcccagaatacagatacaggcgctcatccctgctttaaaggtactggagttgaggatggcgtcagtttccactttacacaggatggtggtcagcgttgcgacgctcaacatgatgatcaaaatagcgttggtggtgttcatcagcggtttctcaaccaggccgaggctcggactgttaacaatcgcataaacaaccacgcagataacgcccagcaggaacagccagacggaattttttgccattggtttgatttcaatctgcttttcaccacgcagttcaatcagcccttcttccagacgcttgcggtaaatcgggtcgtccgacagtttggagttgaacagcatcgtgaccaggaaggacatcaccagcaccgccagcagcgtagaggggataaccacggacagcaggtgaatatagctaatgccatgaccttccataacagaagacatatacaccacggccgcagaaatcggcgaggcggtaatcgcaatctgcgcggataccacggcggtcgagagcggacggcaaggtttgattccctgctccttcgcgacttcagcaataaccggcagcgttgccagggaaatattcccggtaccagcaaaaatagtcaggaaataggtcacaatcggtgcgaggatagtgatgtatttcgggttcttacgcagcagtttttccgtctggtttaccaaataatccagaccgcccgcgacctgcatagcagagatcgcggcgataaccgccatgatgatggaaatgacatcgaatggaattgtccctggcttcacgccgatggcggcaagtaccagaacacccagcccacctgcgaatccaataccgatgcccccaagtctggcgcccaaaaagattgccagcaaaacaatgataagttcgacaactatcat

SEQ ID NO: 31 - DNA, 999 bp, Salmonella typhimurium
ttacgcgtccgggtattcgcggataaagcgttccacatcgtcaaccatatggcggttgccgacgaagaacgagcggcgctggtgcaggctttccggaatgatatccagaatacgttctttaccatcgcttgctttgccgccggcctgttccgcgaggaacgccatcgggttgcattcatacagcagacgcagtttcccctgcggatggctggcggtgctggggtagagatagatgccgcctttcagcaggttgcggtggaaatcggccaccagagagccaatgtaacgtgaggtataagggcgacttgttgaactatcctcttcctggcagaatttgatgtacttcttcacgccattcgggaatttaatgtagttaccttcgttaatggagtaggttttacccttttccgggaaacgcatacgttcctggcacagacagaacacgcccaacgacggatcgtaggtgaaagcgtgtacgccgcagccggtggtgtaaaccagcatggtggacgagccatacacgacatatcccgcagcgacctgtttgttgccgggttgcaggaaatcttcttcggtgaccggcgtgccgacgggcgtcacgcggcgataaatcgagaaaatcgtaccgacagagacgttaacgtcgatgttagaagagccatccagagggtccatcagcaccacatatttcgcgtgttcgcagccttcaaagacgacaatttcgtcctcttcttccgatgcgatgcccgctacaatatcgcgcgcttttagtgcagctttcagtttctcgttcgcgaacagatcgagtttctgctgaacctcgccctgtacgttctcagcaccgctggcacccaggatatcgaccagaccggccttattgatatcgcggtggatgatcttggcgcccaattttattgccgacagcaaagcagtgagctcaccggtagcctgagagaactcgtgctgcttttcgacaataaattcacctaacgttttcat

SEQ ID NO: 32 - DNA, 933 bp, Salmonella typhimurium
ttatgcgtcaacgtcggcggtttcacaccgaatcaaagtacctttctcgcccgcgagaatggcttgcccatccgccagcgagccgattccggcaatgccgcggcaatggctgacaaactcagcgcaggcggtcactttcgggcccatcgaaccggcgtcgaactgcatttcacgaagcagctccggcgtaacctgcgccagcgggcgttgggtgggcttgccccagtcgagatacaccgcgtcggcatcggtcagaatgagcagcgcgtcggcgtgaatttggctggcaagcagggcggcggacagatctttgtcgatcaccgcctcgataccgtggtagccatcggctttttccacgaccggcacgccgccgccgccgttacagataaccaggtgatcgcggctaatcagcgcgcggatggcatcgttttccacaatgcgtttcggctgcggggagggcacaacgcggcggaaggcgttaccgtcggctttgaatacccagcccttttctgcctgtaacgcacgggcctgcgcttcgtcgtaaatcggtccgatatatttggttggattgaggaatgccgggtcgttggcatcgacttcgacctgggtgagcaggacgctgatttcacgctccggcagatgattcttcagcgcctgttgcagcatgtagccaatcatgccctggctttccgcaccgagaatatcgagcgggtagggtgtaacgttagcgtaggcgctattttgtagcgccagcagtcctacctgtgggccgttgccgtgcactaacaccacgcgccattgccgcgtaagctgggcgatggttctggccgccagttcgatatttttacgctgaatatcagcctccagcggttcgccgcgtttgagcagcgcattgccgcccagcgcgacgaccagtgtgcgtttgttttccat

SEQ ID NO: 33 - DNA, 255 bp, Salmonella typhimurium
cacctgtctcagcaaaggctatgggtgagattgattatgcctttgtatggaattttccaaaacaggcaatagccagcccatatcttacctatgaccaacaacatcgccgcgaccgtatgctcgcggctttgctgcatgcgagaaaggtgctttctctccagcctgaatgcgtgcgttttgatgtttatcgcaccgctgctgtgctggagaaaaatcagggcagtcaacgagccaatgcctttttaataagtttct

SEQ ID NO: 34 - DNA, 2190 bp, Salmonella typhimurium
atgagttttgtatccacaaataataaatccggtatgggagggctgacgacaaccacgccgccgataaccggagaaagtggcggtgtcaccgcagattcagtcgccggaagcgtggcagatgcggcggaatccgccgtggaacaggctgcgggatcgctatttggcgcattgccggagccatcaggactggtgaaagccgcggtagcagcggcgcaggctgccgccgccgcaggtatggcgcaggatgcggtatcggccatcgtctctgctgttgcaggcgggccgggggcgcataatgtgacggtcagcggcagcgccgtaccgccgggcgcattactgttcgccagcctggacggcggcgaaacattaagtgaactgttcagctatgtggtacagctaaaaacgcccgacaccctgaatctgggctatgtctccccggcggccaacctgccgctcaaaccgatggtgggcaaagatctgtgcgtcaacatcgaactggatggtggcggtaaacgacatatcagcgggctggtcacggcggcgcgggtggtgggccatgaagggcgttcggttacctatgagctgcgtatggagccgtgggtaaaactgctgacccataccagcgactacaaagcattccagaataaaaccgtggtggatattctggatgaggttctggcggaatatccctacccggtggaaaagcggctggtggaaagctacccggtacgcacctggcaggtgcagtacggtgaaactgattttgattttcttcagcgactgatgcaggagtggggcatctactggtggtttgagcacagcgaggacagccacacgctggtgctggcggatgccatcagcgcccacaaagcatgtccggactcgccgctggtcgagtggcaccaggaagggctgaagctggacaaggagtttatccacactatcacggcaaacgagagcctgcggactggacagtgggtgctggatgatttcgattttacgaagccacgttcattgctggcaaacaccgtggcaaacccgcgtgaaaccggtcatgccacctacgagcattatgagtggccgggagactacttcgacaagagtgaaggcgagatgctgacgcgcattcgtatggaagcgcagcgcagccccggcagtcgggtgctggggggagggaatatccgcacactcatgaccggttataccttcacgctggaaaactatcccaccgccgaagtcaatcaggaatatctgctgatgcagaccttgctgtttgtgcaggacaacgcgcagcacagcgggcaggaccagcactttaccttttccacccgttttgaactgcaccccacccgcgaggtgttccgcccgcagcggacggtgagcaaaccccacaccaaagggccgcagagcgccatcgtcaccggcccggcgggccaggaaatctggacggatcagtacgggcgggtaaaggtacagtttggttgggatcgctacggcaaaatggatgaaaacagctcctgctggatacgcgtcagctacccgtgggcgggcaaaggcttcgggatgatccagatcccgcgtatcggccaggaagtgctggtggatttcaaaaacggcgatccggatctgccgatcatcgtggggcgtacctacaaccaggacaccatgccgccgtggggactgccgggaatggcgtcgcagagcgggatcttcagccactcgctgtatggcgggccaacgaacggcaacatgctgcgttttgacgacaaaacgggcgcggaggaagtgaagttccacgcggaaaaagatctcaacaccacggtgaagaataatgaaacgcatacggttatggtggatcgcactaaaaccattattaaaaatgaaaccaacagtattggtgaggacagaaacaccacggtaacgaagaatgacggcctttccgtaaaactggcgcagacgatcaatatcggcaccacttatcgtttagatgttggcgatcaattcacgcttcgctgcggcaatgcggcgcttgttttacataaggacggctccattgagttttgtggcaagcaactgatgttacataccagcgatgtcatgcaactgattggtaaaggtattgatatgaacccggatggcggcacagccgtaaccgccgatgatattgccccccttctcacctctgagtga

SEQ ID NO: 35 - DNA, 486 bp, Salmonella typhimurium
ttattcgctctgagtcgccagatgtcggcggcaggtgagggcgtcgcattcgatacgcaccacgcaaaccgctttcatcatatcttcccgataactgaaggtttttcccggatcggtctgacgcataatgacgtccaggccgtagcgcatctcctcgcgcgtttgcaatatcgatgccagtccggtggcgaaaacgctggtgtaggcgtagctataatcacaggggtcatcggcacgtagtaatgcatggtcgccgtccatttcaatgcatactgccgggttcttacgtaacagacgcatctttttcccggtgcgtgcgccgtgaaaataaaatatccagcgtccgttctgatactcgtagccaaaatttacggggacaacatacgggcagagattgtcgttaaaccctatccgacacacttcgtgtttactgagaatagccagtatttctgctatatcagtgacttcccgctctggattactcat

SEQ ID NO: 36 - DNA, 216 bp, Salmonella typhimurium
atgaaaatccgtgctgacagtaacgatgcttttcccgaaagcggcaacgtgcgtatgcggcaggtggtccagtttctggcgatgagtgaatcatcggtttaccgcctgattaaagacaccgactttccccgccccgtccacctctcttcccgactggtggtcttcgatgctgcggaaatccgtcagtggcaacagcgccgcaccgtcatccgttaa

SEQ ID NO: 37 - DNA, 345 bp, Salmonella typhimurium
tcaacgtatagagccatccggataaagatacatgcctccctccagatacacgggttctccttcttctaccgctaaattatgatatagcgattgcatttcatcatctgcactttcttccggttggttttcaactcgataataggtatctacatcatagttctgtttacggagatcgtcgtcgctgtatacgccaagccgtttttttaagcctgttatattaaatatccattttaacccatctttaatataataggcatcaccataagcattttcatcggggcattctttatagcccatccgcaatgcaacatcacagccatgcttaccaacatatttataactcat

SEQ ID NO: 38 - DNA, 255 bp, Salmonella typhimurium
acacacaggatacgataatggataatggacgtgttgaagctactgataggccaacagaaatgattgccagcaatacaaaatacctagtttggaacaacaaagggggcgtgggaaaaactttcctgacgtacaaccttgcagtggagttcgcaatttcccatccagaccaagatgttgtggttatcgacgcttgtccgcaatcaaacgtttctgaaattatccttggaggcaatggtactggtgaagaaaacctaa

SEQ ID NO: 39 - DNA, 654 bp, Salmonella typhimurium
tcagtctgcatcagggttaccggccagcagtttccggaccaccgcagcataacggctcctgaagttttcgacggagaatgcaccgaaggcggcattgttgatatggtaacggccacggacatacacggaaggcgtccccctcacgccatattccttaaacagccgttcctgtaatgccaccatgtcattcacggcgggactttttatacttctgtcatactccccacgactgataccggtggcagacataaacacccggcggacatcgtccggggaatgcaggcgtttctccaccatgccggccgtgaagaaggccttctcgatcacgtcagtttccttcatcaccatggccagcgcccaggcccgtgtcagctcatggccgagggggcccagcaggctgacatggtatttgaccatccggctaccttgcggcagtacgtgccggatggcctggtccacgcccattgtctgtgagaacgcatagcagggcgggcagtaaaaggaaaagaactccaccacagcgggggcatcaaccaccgggggagttatggactcccactcctgcgcaaccacaggacagacgcagccagctaacaaaaaagaaaataatattcccttcagggaaaacagatcccgggcataattcatcgtcac

SEQ ID NO: 40 - DNA, 558 bp, Salmonella typhimurium
ttactgtgggtaaaccacatcaaaaaccaccgtcacatcaatattcccctccggtgaatttgccggaatatcagtcacagggcggagctcacagttgttcggggagggggatatgcagaaagcatcatcgtccttcccagtcagtttcacccgcttactaccattttccagccagaacagcgggccattatttgacggctgaccgttcatccgcataatgactacgctgctgtcaccgcccccctgcagggttccagtggtgtttcttgctgtcagtgctgtcttcaccacagtactctgcccacaatccactttcacggtaaacggtctgtgttgcatccggactcctttattcattactcccagttgatagttcatcgtattaccgccgttatcaaaggtcagtttgcaggtctgttgcgggttggttaacgtgaatggaatggttatattttccttcgaagccgcttctgtcgccaaagggaacagcagcccagtaaccagcgctcctgcacacacatgacgtttcatccacctgatttcacttcgtctcatcat

SEQ ID NO: 41 - DNA, 1776 bp, Salmonella typhimurium
ctatgagttgagtaccctcatgtttattattctttttatcctgtttgtgtcagcagttgcatcatcacttaatctcagcttactaagctggcttgcaaagtcttgggatccacaatttacaatgctttcgattttgagtttagtatttggagggaaaagcatctctgcctctcccttaaaatgtgcaacatctccgagtattctacctttatgtcctttttctaggtatatgttgagaatagtgtcatttatccatgccttatctggcgatgtactcataaaagctttatctattattatattacctatagtagtgtattccttcagcacatccgataatgcgggcttatcaagcttcaggccccggtatacgactctgtgatctgtttcgggaagtgaacttaatccctccgcaatatcatttatataaactgacatggcatttttaaactcctcatcactgggttcatttgtggaaagatagtctctggagagcagagtttcttttgcctgtgtttcaggataatcatccccacgtaaatatttattaatcacactgtacccttgagctgaatagtacctcagagcttgaatctgctttgattcctctacaatcgcccattttgattttggtcgagatgaattacctcccatcatcggaggaggcggtggcggtggcatcatattgttgacaggagctcttctataaccgtcgccttcataggccagcgtccgagcagcgcaaagctgtgtcagtatcggattttcgtcatactccagcagcagacgggaaaccagcgtatcggcttcacccagttcatcaggaaagtggtggaacatcaggacttggcggcacaggcgatggaggcggatctcaaagccgtagttatacagggagaagggatcctggcgggcgagccagctgttctgagcagtgaatgcaggcggtacctgtggatctacaccacgttcgccgtagtcaaacactagggtgaacagccactgtaccgcgggtgtggcgctagtccagaggtacagatcggcggcgggggtcgcgttgccatactgtaccttgctgagatagcgcatggcgctgcgatcgcgtccggcctcgttcccattgaggtccacattgtcaccgttctccgccaagtaggagtaatagatatgctcgccggcaggggtcaccgactcctcaaccagccattgcgccgtatgagaggcggcctgcggatcgctgaggcgtgctgcggcggttttccccagcaggtgcaggatgccgttactgtcatgcagtaaccagaaatcatcgccgttgctgttgcccacccagtactccaggcgataaaaactgctctccgtgcggggctgatagcgggtcaccgtgtagctttgcgggaacgatacgtcaccgtacgcgaagcaggtgacgggattgggggcatcaccggtgctgagcgtttgaaccagcacttctccgtccggccccagaaactcatcgctgtcgttatactgcggcacgccatggctggtgcggcgggcaatgctcattgtcgcgcaggaccagcccacgccgaaggggccattgccgccaccgctgctgtagtgcagcgccagcgcaggcgcaaagccgcgttcggcgctgatgggcagaggcagcgttatactggctaggccgtcagggcctgactgactcagcgccttgcccccttttggcaggaaagggggagtgatcagcgctaaagtggcagatgaaaaaccatttagtatcaacat

SEQ ID NO: 42 - DNA, 1026 bp, Salmonella typhimurium
tcatattggcagaccgaccgccagcattctgtcgcgtagttcggccgtgcgggcagggtctaactgattattaaataatgccctgatttcagctggttttgcatcgaactgctccaccatatccttcagccggtaaccatgtcgcgtgagcgtcggctccaggtcatccagctgacgtgacagcacggattcaaccagagtggcagtaatcggtttttcgcccgtctggtatcctgcttccatcgccagcgtcaggtgcaactggacctgcagcggtgttcgcagtttcatcgccagcaggtcaacggcttcggtcgttagaatatcttccggcttacccttaccggtgctggtcttcagcagccactggatatattcacgctgactgccggtgatcccgtccagtgtaaaaatatcggtacgatagccaatttcctccatcgtcggacgacgcaggtcattacgcagttttgggtgaccggccagaacgacggacagcctaccaccgccgtcttcaaccacttccatcagccgtttgagccccgttagtgtattaccgttcaggtcatgggcttcatcaacaaacagcgccaccgggcgtttgccttttttgaccagttcctgcagctcacgctcgcggcgttcaccttgtttgtggatctgcacctgtttatcctgtgccaggtcataaaacagggcattaatcagcgtggcgagccggacactctgtttgtccaccgacagggagcgggcgacaatgattttattttcatccagcagttgctgctgcaggcgtcgcagagtgacggttttaccgcttcccaccacgccacagaccgctatcagtcgtccttcgcgtatcgcacccttaatgtctttcatcagctgcttatggtgggcagtttcataatacccggcctgttcaatagactgcgtcagtccataatgctccatcacttcaacccgcatggtcctctcctgattgtctgctacgaaaatagtctctgatgcgggcgagtacttcac

SEQ ID NO: 43 - DNA, 1665 bp, Salmonella typhimurium
tcaacccgcatggtcctctcctgattgtctgctacgaaaatagtctctgatgcgggcgagtacttcactacggttaagcgtctcagtcagaatactgtcgataaacgcccggtcttcatccgacattctggccagcggtatggccagatcgtcggcaattgccagttttgccgcaataacggtgggaaagtggtattcaaattttcgggtatcaaagggctgatgtggcaacgcatcaatgcgctgctgagtgtcatcactgaccacgcggagatcgctgccggacaatgcgctgatggggatgttcagctgcctggccagagcatggatacgatcggcccgttcagccgctttaccgcgtctgaacgtccggtaacggtgcagcggcacaggccccgacaccggataataaggcccccatgtttcaccggtaaactccacatacatctcttcgtcaaacagcccccacagcagaatgacggtttcacccgccatatccggttcaacttcccatgcggtgccgtctatcgttatccgcgcatcaacacccaccttgcgggattccggctcccgggcgaaccgacagtattgttcccagctgcacatatccctcacaccttcctggccgatatttgccagccagtcctccagtcgggagtgtttctcgctgcggtgacgctgcgcgttataacggctcagatagttccagagccattcgttggcctgcagctccgtttccggtttatggaaatggtacagagtttcatgtgcctccttgacggtccggaaaggacgttcaactttacctttggaccgtgccgtcgtccgggtgccgtccttgcctgccggcgtatgcgtcagccagtcaaccttcagggactgcatcacattctggaatacatggtttttggccaccggtccattatcgaggtacagcaatttcgggcggccctgaaaaggaaaatcagacctggtttttggggccatggcgttaaagagaaaacgcagcgcagattccgcatcctcaccgtacacacaccggtattcctggtatgcgacaccgctccggtcatccactacgctgaacagcatcagcgtgggttcgccccgggcaggatctacccagtcaggccgctcaatatgtttgagatcggatggcgacatatcaaactgccaacagtcattgctgttttcagcctgaaatcttaccgccggaggctcccgtaacaggcggggctggtcgagacgccagcgggaaagccagcgattgacggtctgcttacgaagtaagcctttgggacttttaatcaatccctggaccgtctccacgccatgctcttccagcagctgtattgcccgtccggtcgacagatggcggccggatttatttgtggttcgtaatttcagtgcagcaatcagttcgcagtaatgctccagctcggacggtggcagtatccggggttgaccatgatcactgcggtgggccgttcgcggtttcaaaacaaggtgaagagcgcgataaaccgtcgtgactgaaataccatacagctgggcggtagcggcaatctgattggcacgttcagggctttttggcggcaggcgatcgagccgttgccgtagttgcaacagggagtcagacggaatcgcgctacgccggctgctcat

SEQ ID NO: 44 - DNA, 1275 bp, Salmonella typhimurium
tcaagtcaatttcgctgcaggaatatctgcccaacgtgtcgtataagctggcgaaagtagttcccttttcatctgccactcgggggcaatcccccgaccggcgaaccatattttccccttgcccggatggttaatcccatccaggacttgcatcagctgctcgctccgttcccgcggctgtacttcatcaaacaaattaagctgcgataccccggttggcgtgaaatcgttcagcatacagcctgcctttgcgtaacggtgaccatccacccagatcctgtccagagctctgacggcagcggcaatgatgtcccgtgtatcctgcgtggggatgagcagtttttcactggccagattaccgtagtagggctcagttacggcgaacggcgatgttttcacaaacacggcaatatgcctgcagaactgccgttccccacgcagcttttcggcggcacgttcagcgtgctgacagactgcctgccgcatcgcttcataagtcgtgactcgttctccaaagcttctgctgcagactatctgctgtttggggggcggtgcttcctccagggaaatacagctttctccattgagttcccggaccgttctctccagaaccacattaaagtttttcctgatgaacgttggattcgcgcgggccagctgcagtgctgtggtgatccccattgtgttcagcttctttgagatcctgcggcccacaccccagatttcctccaccggttgcagtgacagcagtttctccgttcgtttctgattgtgtaacgtcagggcaagcacgcctccgaactgtgaccattctttcgatgcccattgcgcgcttttagccagcgttttggtcggtcccattccgacgccgatggtcagccctgtgccggaacgaacgtgctcacgcagctgtcggccgaaatcctcgaaatcgatgcaactgtctataccgcgaatatccagaaacatctcgtcaatggagtactgctcaacgcgtggcgccagctcttccaggtgaaccatgaccctgttcgacattgatgcgtagagggcgtaattactggagaacgcgataaccggctccggaaatttcgccgacctcagttgaaaccacggcacccccatttttatgcccagtttttttgcttcagcgctgcgcgcgattacacaaccatcgttgttactcaggaccaccacagacctgtcacgcaaatcggggcgaaagaccttttcgcaactggcatagaacgagttgacgtcagccaaagcgaacat

SEQ ID NO: 45 - DNA, 1998 bp, Salmonella typhimurium
atgtcagttaccaattctaatgcaaaatccgcagtaaaaaccagccgtaaggcgaaaaacgccgccagtgccagtaacaccgtattgtcggcggtgctggcgcagaccgaagaacaacacgtaccgctgtccgcactggtcaaatccccgcagaacgtgcgtatcgtgccgtattccacagagagcgtccgcgaactggcggactctattaaagggattggactgctccagaatctggttgttcacgccctccctgacggcctgtacggtgttgccgctggcggtcgccgtctggcggcgatgaatctgttggccactgagaacacgatccacccggactggcctgtccgcgtgaaggttgtgccggataatctggcgaccgccgcttcactgaccgagaacgggcagcatctggaaatgcaccctgccgaacaaattgcgggattccgcgcgatggcagcggaaggcaaaactcctgcacagactggcgatctgctgggctattcgccccgtcacgtacagcggatgctgaaactcgcggggctggctccggttatcctggaagcgctggctgcggacaaaatcaccacggagcactgtcaggcgctggcgctggaggacaatcccgaccgtcaggtgcaggtgtacgaggcggcgtgtcgagagggctggaacaataaaccggaagtgcgcgtgatccgtaatttgatcaccgacagtcaggtttccaccctcaacaacagcaaatatacgtttgtcggtgaaaaagctttctccggcgatgaaatccgcgcagacctgttcagcgacgaacagggcggttttgtggacaaactggcgctggatacggccctgctggaaaaacttcagtgggtggcggagtgcctgaaagaggccgagggctgggcatggtgcgcgggacggatggagcctgtcagccgctatggtgaggataccgaagtgtaccgtattcaggatgagcctgacgcggtttacacggagcaggaacagcagcgcctggacgagttgcaggaactgtacgacgaaaaccagaccgccagcgatgaaaccgacacgatggagtcagagatagaggccatcgaatgcgcggcacaactccgggcatggacgctggaaatgcgcgcacagtccggcgtggtggtgtcatggcgtcacggtgaaatctgtgtccagcgcggggtgagcctgcgtgagcagtctgaaacggaagatgaacccgatcaggttccggtatatgagcgccagccggagcctgtggacgaaatcagtgttcccctgctgaccagaatgtgtgcagaacggacattgtcggtccaggcggcactgatgcagcagccggaaaaatccctggcgcttctggcatggacgctgtgtctgaacgtgttcagcagcggcgcgtataaccgacccgctcaaatcagcctgaactgtaagcattactccctgacaaaggatgcgccgcccggcgagagcggtgttgcgtttgtgacgctgtcgcaggagggaaaacgtcttgaaacgttgctaccggagggctggacacaggacttcaccacctttttcaccctcagcgccaaagaccttaccgccctgctcagtttctgcaccgcatgcagtcttgacggtatgcagatgcgcggcgccggaggcaccacccgcagtccgctcgataagctggaaatcgcgctcgctttccatctgcgcgactggtggcaaccgacgaaggccgatttcttcactggccttaaaaaaccgcaaatcatcgccgcgctgaatgaggccggactgacaggcgcggcgcgggatgcggagaagatgaagaagggtgatgcggctgaactggcagaggacaaaatgcgtgacaaccgttgggtgcctgtctggatgcgcgcccctgatgcagaaaacgacgtatctgataccgaaaacggcagtgctgatgcagacagccaccacaccctgcccgatgcagcctga

SEQ ID NO: 46 - DNA, 471 bp, Salmonella typhimurium
tcatcgggcgggagtctgcctggttttactttgttttatcgcgatccagattcggtgtacatcagtcgcatagtccagacgacgtgcatcctgaaggggagtctttttaaatccggcgttgtacgctccgactgctgtccaggataccccccactttctgaatgcgattgccagataataagctccggtgtaaatattcaggcagggatcggagacaagttgttccggttttattccataacgagccagttcgttaaagtgctgagagtcaacctgcattaaccccgagccatatcccgtaaccggattaataccgacggcattagcccggttacgggattccttccatgaaatcgcccgcagtaaatccggatctattttatagtctctcccggccagatcaaaacagtcagcggcatggactaccgtgctcattaataccaggaggacagacaggagccatttatacat

SEQ ID NO: 47 - DNA, 1422 bp, Salmonella typhimurium
atggcgagcatcaatacggttgtaaagcgtaaacagtacatctggctggggattgttgcggtgggggctgccgctgccattggcggaggcctttacctgtctgacgtcgacatgagtggcaacgggacggccgcagagcaggagccggtaccggatatgaccggggtggtggacacgacctttgatgacaaagttcgtcagcatgccaccacggaaatgcaggtgacggcggcgcagatgcagaaacagtacgacgaaatccgccatgagctggatgttctgaataagcagcgcggtgacgaccagcgtcgtattgagaagctggggcaggacaacgccgccctggccgaacaggtgaaggccctgggagcgaacccggtgacgaccacaggagagcccgtgccgcatacacctgtctcaccgcccggtccggaaggagaacctcagccgggtaatacgccgatgaccttcccgccacagggagccgttcctccgccaaccgctttttatccggggaatggcgtcacgcctccgccacaggtgacataccagtccgtgccggtgccgaaccgtatacagcgtaaaacgttcagctatgacgctgccgcgaagaaaggtccctccctgccgtatatcccgtccgggagttttgcaaaaaccatgctgatcgaaggagcggatgccaatgcctccgtcaccggtaatgaatcgacggtccctatgcagttgcgcattaccggcccggtggagatgccgaacagtaaaacatatgacctgacagggtgctttgtgggtctggaagcctggggggatgtgtccagtgaacgcgcgatagtacgtacccgtaatatcagctgcctgaaggacggcaaaaccatcgacatgtcggttaagggacatgtcagcttccgtggaaagaacggcatcaagggtgaagtggtgatgcgtaatggcaaaatcctcggctgggcgtggggcgccggttttgtggacggtatcggccaggggatggagcgggcatcccagcaggcggtggggctgggggccactgcgacttacggcgcgggcgatgtgttcagaatggggattggtggtggtgcatcgaaagcggcacagacactcagtgattattacatcaaacgtgccgagcagtatcacccggtgatcccgattggtgccggtaatgaagtgaccgtggtgtttcaggacggttttcagctgaaaaccgtggaagaaatggcacaggagcaggcccgtcaccggaaggaggatgaaaatgcggaaagcccggtgcctatacctccgtcagtcgacagccatatgaacggctttaacaccgaccagatgctgaagcagctgggtgacctgaatccacagcagtttatgtccggcagccagggaggacatgtaaatgggaaataa

SEQ ID NO: 48 - DNA, 1827 bp, Salmonella typhimurium
atgaaacgtatgttacctctgtttctgcttctggcagccggccaggcacaggctgacagtaacagtgattatcgtgcgggttcagattttgcccatcagatcaaaggccagggcaccggcagtatccggaattttaatccgcaggagagtatacccggctataacgcgaatccggatgaaacgaaatattacggtggcgtgaccgccggtggtgacagtgggctgaagaatgacggcacgacgcagtgggccacaggcgaaaccggtaaaaccattacagaatcgttcatgaacaagcccaaagatattctgtcaccggatgcgccgtttattgaaaaaggaagggatgtggtgaaccgtgccgacagtattgtgggaaataccgggcagcagtgcagcgcgcaggagattaaccgcagcgaattcacgaattatacctgtgaacgcgacaccactgtggaggaatactgtacccggacggccaccatcaccggcgactggagagagacaacagaggtcagaacctacaccctcaccgcctttagtttcagccgttccggtaagcagatcgttttcagcgtaaccgtgccggaagcgggtacgataagcagcgccagcctgaatgtgatcacacagaattatctgtggaattcccgtgccggctttatgaataccatcttcaacatgacgtggggcagtaccattacactgggtggcgcgacgggaatgatgctgagtaagggccagattctgagcgggacaagctgcagcgggaacggtagctgtaccgggacgctggatgaccgcatttttaacgaactgaccagcgggagaacgacgttcacgctgacactggtgatgcaggtaaaggaccgggagtggataccccgggtggagtgggtggaaagctgcccgtttaataaagcggatggcgtgctgaaaggcacagaatgctcagagccaggtggtacgaaaaccggggtgatggaaggaaaaccctggagcctgacggaggcctgctgggcataccgcgataaatatgtcacccagtctgcggacaatggcacctgccaggcgtatgtggacaatccggcctgtactcttgccacccggcagtgcgcgttttattccggtgagggcacctgcctgcatgagtacgccacgtactcctgtgagtcgaaaacgtcaggaaaggtcatgatttgtggcggggatgtgttctgcctcgatggggaatgcgataaggcgcagagcggaaagagcaatgattttggcgaggcggtatcgcaactggcggcgctggcggcggcaggtaaagatgtcgcggccctgaacggtattgacgtccgtgcattcaccggacaggcgaaattctgtaagaaggccgcagccgggtacagcaactgctgtaaggacagtggctgggggcaggatatcggtctggctaaatgcagtagtgacgaaaaagctctggccaaagcaaaaacgaacaaactgacggtcagtgtcggggaattctgttcgaaaaaggtactgggtgtctgtctggagaagaaacgcagctactgccagtttgattcgaagctggcgcagatagtccagcagcaggggcgcaacggccaactgcatatcagcttcggcagttcaaaacatcctgactgccggggtatcaccgtggacgaactgcagcagattaaattcgaccagctggacctcacgaacttctacgaagacctgatgaataaccagaaaatcccggacagtggcgcgctgacggagaaggtgaaagaacaaattgcagaccaactcaggcaggccgggaaataa

SEQ ID NO: 49 - DNA, 549 bp, Salmonella typhimurium
atgtctctcaataaggctttgctgttcctgttgcttctgatggggacgggggttaatgcctccacgcgggaagagattgaacggctgtataacccgcacgggatggccgcaccgtccgggcaaaagcagccagcagatacgcagggcgtgcagaaagtaacgccggcgccccgctggtttcgtctcagcaacggtaaaacggttaacctcgccgactggaaagtggtgttgttcatgcaaagaagctgcccctggtgccaccagtttgacccggtactgaagcaggtggcacagcagtatggattttcggtattcccttataccctggacggacagggggatgccgcgtttccggaggcgctgccggcaccgccggaagtgatgcagaccttcttccccaatattcccgtcgccaccccgacaacatttctggttaacgtgaacacacttgaagcattacctcttttgcagggggccaccgacgccgccggttttatggcccggatggataccgttctgcagatgtacggagaaaaacatgcagggtaa

SEQ ID NO: 50 - DNA, 1383 bp, Salmonella typhimurium
atgcagggtaaaacgagaattaaaccgcttttcatattatgtacggcgctgatgaccgtcgcacccgccgtctctgccgatgtgaacagcgacatgaaccagttcttcaataagctgggctttgcttccaataccacacagccctccgtctggcagggacaggcggcaggatatgcctccggcggctctttatatgcccggacacaggtaaaaaatgtccagctggtctccatgaccctgccggatatcaatgccggttgcgggggcatcgatgcctatctcggctcattcagtttcattaacggcgagcagctgcagcgttttgtgaagcagattatgagtaacgccgcagggtacttttttgaccttgcgctgcagacgacggtgccggaaatcaaaacggcaaaggattttctgcagaaaatggcctccgacattaacagtatgaacctcagctcctgccaggcggcgcaggggattgtcggggggcttttcccaaaaacacaggtctcccagcagaaggtctgccaggacattgccggtgagagcaatatttttgccgactgggcggcgtcccggcagggatgtactgtgggcgggcaatccgacagcgtcagggataaagccagtgacaaggataaggagcgggtgaccaaaaatatcaacatcatgtggaatgctttgtccaaaaacaggatgtttgacggcaacaaggagctgaaagagttcgtgatgacgctgaccggttcactggtttttggacccaacggcgaaatcatgcccctgcctgccagaaccaccgaccgggctattatccgggcattaatggaaggcggaacggcgaagatataccactgcaatgattcggataaatgcctgaaggtggtggccgacacgccggtgaccatcagtcgcgacaatgcgctcaaatcacagattacgaagctgctgaccagtattcagaacaaggcggtcagcgacactcccctggataataaggaaaaagggtttatctccagcaccaccatcccggttttcaaatacctggttgacccgcagatgctcggcgtgtcaaccagcatgatttatcagctgacggattatatcgggtacgacatcctgctgcagtatatccaggagctgatccagcaggcccgggcgatggtggccacagggaattatgacgaggcggttatcgaacatatcaccgacaacatgaatgacgcgacccggcagatagcgtccttccaggcgcaggtccaggtgcagcaggatgcgctgctggttgtcgaccgtcagatgagctacatgcgccagcagctgtcagcccgcatgctcagccgttaccagaacaactatcattttggcggaggtgcgcagtga

SEQ ID NO: 51 - DNA, 2823 bp, Salmonella typhimurium
gtgaacgaagtctatgtcattgccggcggagaatggctgagtaataacctgaacgccattgcggccttcatgagcacccggacgtgggactccattgagaaaattgcgctgaccctgtccgttctcgcggtgtccgttatgtgggtacagcgacataacgtgatggatctgctgggctgggtggcggtgtttgtgctgatatcacttctggtgaccatacggacatcagtacagataattgataacagcgacctggtgagggtttaccgggtggataatgtgccggtcggactggcactccccctttcgctgacgacccggatcgggcatgcgatggtggccagctatgagatgatttttgcccagccggacagcgtcacctacagcaagacaggtatgctgttcggggcgaatctgattgtgaaaagcaccgatttcctgtcccggaatccggaaatcattaacctgtttcaggactacgtccagaactgtgtgctgggggatatttacctcaatcacaaatattccctggaagaactgatggaatccgatgacccctatacgctgattttttcccgcccaagtccgttgcggggggtttatgacaaaaataatcattttgtcacctgcaaggatgcgtcggtcacgctgaaagacaagctgaatctcgatacaaagacaggaggcaagacctggcattattatgtgcagcagatatttgggggcaggccggaccctgacctgttattcagggaactggtaagtgacagttacagttatttctatggctccagccagtcagccagccagatcatgcgtaagaatgtaacaatgaacgctctgaaagaagggatcaccagtaatgcagcccgtaacggtgataccgccagtctggtgaatctggccaccacatcctcgatggaaaaacaacgtttgtcacatgtctccattggttatgtgacaatgcgaaacctgccgatggtacagactattctgctggggatagccatcgggattttcccgttactggttctggccgctgtctttaataaactgacgctgtcagtgctgaaagggtatgtatttgccctgatgtggctgcagacatggccgttgctgtatgccattctgaacagcgccatggtgttctatgcgaaacagaatggtgccccggtggtgctgtcagaactctctcagatacagctgaaatattccgatctggcatcaaccgcaggttatctctctgccatgattcccccgctgtcgtggatgatggtaaaaggtctgggcgctggattttccagcgtttacagccactttgcgtcttcgtctatcagcccgacggccagtgcggctgccggcgtggtggacggcaattattcctacggcaacatgcagacggagaacgtcaacggcttcagctggagtaccaacagtaccacgtcatttggccagatgacttaccagaccggtagtggggcgaccgccacgcagacccgggacggcaatatggtcatggatgccagcggtgcgcagtccagactgccggtgaatatcaacgcgacccggcagatagcggcggcacagcaggagatggcgcgggaagccagcacgcaggcagaaagcgccctgcatggtttcagcagcagtatcgccagcgcctggaatacgctcagccagttcgggacgaaccggggcagcagcgactcagtgaccagtggtgctgacagcaccatgagcgcgcaggattccataatggccagccggatgcgcagcgcagtggaaagctatgcgaaggcacataatatcagtaatgagcaggccactcaggaacttgcagcgagaagtacgcgaacatctgggggtatttatggtgatgcaagtgcagagtggggcataaggcccaagatattgggggtcggtggtggagctggtgttaaagccggtggtcgtgctggtattgattggagcgatgatgatacgcatcaggccagcagtagttcacgatccagccaggatgttcgtcatggtgttgatgccaaagccacgcaggattttaaggaggccagcgattacttcacgagccgtaaggtcagtgagtccggaagccatacggacaataatgctgattctcgtgtggatcatttgtctgccgccctgaactcagcgaaacagagttatgaccagtacaccacgaacctgacccgcagccatgagtatgctgagatggcgtcccgtacagaaagcatgagtgggcagatgagcgaagatttgtcacagcagtttgtgaattttgtgcaaaagcatgcgccacaggatgcagaaaatattctgacaaataccagctcgccggaggtggcagaacgacgtcgggcaatggcttgggcctttgttcaggagcaggtacagcctggtgtggataatgcctggggcgaagcccgcggtgatattggcagtggtatgagcacagtatccggtggtggtgataaacaggatgtggtagccgatcatcaggcccatcaggcaacggtggaacaacggacgcgggacagtaatatcagtaatgatgtaaaaaaccaggttgataatatggtcacagactatcattccgatataaacgatacttatggaaatatccagggtgaggaaaagactattgaccagcagtattctggcctgcaaaaacagtataaaacagaagcactatctcagaataataaatataatgaagaaaaggctgcacaggaaaggatgcctggcgcggatagtcctgaagaactgatgaagagggcaaaagagtatcaggataagcacaaacagtaa

SEQ ID NO: 52 - DNA, 2244 bp, Salmonella typhimurium
atgagctttaatgcgaaggatatgacccagggcggtcagattgcgtccatgcgtattcgcatgttcagtcagatcgccaacattatattttactgcctgtttattttcttctggatactcgtcggcctagtgttatgggtgaaactcagctggcagacgtttgtgaatgggggtatctactggtggtgtaccacgcttgaaggaatgcgggatttaattaaatcccagcctgtctatgagatccggtattacggccagacgttccggatgaacgccgctcaggttctgcaggacaaatacacggtctggtgtggggagcaactgtggtcggcctttgttctggccgcctgtgtggcgctggttatctgcctgattacattttttatgaccacatggattctgggacgtcagggaaaacagcagagtgaggatgatgttaccggaggacgccaacttaccgacaatccgaaagacgttgccagaatgctgaaaaaagacggaaaagcgtccgatatcctgattggcgatttgccaatcattaaggattcagagattcagaactttttgctccacgggacagtcagtaccggtaagtctgaaatcattcgccggctggctaactatgcccgtcagcgcggcgacatggtggtgatgtacgatcgttcctgtgagtttgtcaaaagctactacgacccgtccatcgataaaattctcaacccctgtgacgcgcggtgtgccgcatgggatttatggcgggaatgcctcaccctgccggattttgataatgcggcgaataccctgatcccgatgggcacgaaggaagatccgttctggcagggttccggacggaccatttttgctgaagcggcatacctgatgcgtaatgacagcgaccgcagctacagtaagctggttgacacgctgctttcaatcaagattgaaaaactgcgaacctacctgcgtgattccccggcggccaacctggtggaagaaaaaatcgagaagacggccatttccatccgggctgtgctgaccaactacgtaaaagccgtccgctatcttcaggggatcgagcgtaacggtgaaccgttcaccatccgtgactggatgcgtggtgtacgtgaagatcagaagaatggctggctgtttatttcttcaaacgctgacacacattcttccctgaagccggtgatttccatgtggctgtccattgccatccggggcctgctggcgatgggagagaaccgtaaccgtcgggtgtggttcttctgtgatgagttgcccacgctgcacaagctgcccgacctcgtggaaattgtcccggaagcccgtaaattcgggggctgctatgtctttggtattcagtccagtacacagatggaggatatctatggcgagaaagcggcggcaaccctgctggatgtgatgaacacaagggcctttttccgctcacccagctataagattgccgactatgtcgcccatgagattggtgaaaaagagatcctgaaagccagtgagcagtattcctatggtgccgatcccgttcgtgacggggtgtcgaccggtaaagagatggagcgtgtcacactggtcagctactccgatattcagtcactgcccgacctgacctgttatgtcacgctgcccggaccctatccggcagtgaagctggccctgaaataccaggaacgtcccaaagtggcgccggagtttattccccgggaaatgaatccggaggcggaagcccgtctgagcgccgttctggctgcaagggaagccgaggtacgtcagatgtccagcctgtttgaaccggatacagaagcggttgcgccgacagcagcagaagcgcaggctgaacagccgcaacagccgcaacagccgcaacagccgcaacagccgcaacagccgcaacagccgcaacagccgcaacagccgcaacagccgcaacagccacagcccacggttgtcagcgataaaaaatcagcagcggcgggtaccgccgtgaatacgcctgcaggcggtgtcggacaggaactgaaaatgaagccggaagacgaagagcagccactgccccccgggattaatgcgtccggtgaggtggtggacatggcggcgtatgagcgctggcggcaggagcaggaggtgaatactcagcagcagatgcaacggcgggaggaggtgaatatcaacgttcaccgtgggcacggaaaggatgaaccggagccgggagatgatttctga

SEQ ID NO: 53 - DNA, 741 bp, Salmonella typhimurium
atgacgatggataacgccacacgtaacgattcgcgggcagtccgggtggatacccggctgcagcgactgctggcctggtcgccgggacagagagatctcatcaaaaccgtggcgctgctgctgatggtggctgaccatattaaccgtatcctgcacctgaaccaagagtggctgtttctggccgggcgcggggcgtttccgctgtttgccctggtgtgggggctgaacctgtcccagcatacgcatatccgccagtctgcgattaaccggctgtggggatgggcggttatcgcgcagtccggatattttctggcgggatttccgtggtatgaagggaatattctgtttgcctttgcggtgaccgcgcaggcgctgaagtggtgtgagcagcgctgcctgtttcactctgcggccgcgctgttactgctgacggcgtggatacccctgtccggaaccagctacggcgttgccggcgtgctggtgctggtcatctgttaccggctgtaccggaccacagatactgaagaacatctggcgcttgcggcctgcctagtggtggccgtccccgcgctgaatctggtcaccagtgatgccgcggcggtggcaggacttctggtgaccgggctgacggtatggcttgtttcgctgacaggcaaatcacggccccggttctggccggctgattttttcccggtattctacacctgccatctggctgccctgggcgttctggcgatgtga

SEQ ID NO: 54 - DNA, 255 bp, Salmonella typhimurium
gaggatgaaggagataccgaatgtctgaccctgtacgtattacaaatcccggtgcagaatcgctggggtatgattcagatggccatgaaattatggccgttgatatttatgtaaaccctccacgtgtcgatgtttttcatggtaccccgcctgcatggagttccttcgggaacaaaaccatctggggcggaaacgagtgggtcgatgattccccaacccgaagtgatatcgaaaaaagggacaaggaaatcacag

SEQ ID NO: 55 - DNA, 255 bp, Salmonella typhimurium
caccgacagcgagtctggccatgagtgaacatcgcgttaaccccgagcttttacatcgtacagcctggggaaatcctgtctggaatgcactccagagtctcaatatctatggcttttgcctggtggcaagtcttgtggccagttttatctggccacttgcattaccggcatgtctgttgttcacactgataacaatgctggtatttagtctgcagcgatggcgctgccctcttcgtatgcccatgacgctggaat

SEQ ID NO: 56 - DNA, 255 bp, Salmonella typhimurium
ccagaaatggagactttgtcatgtcttacaatcgacagcctgtcgcagaagatcctatgcagatatggggcgctgttggtgtccttcttatcctgctgctattcgttatatggttattcttgccggaagtggtttacgccagctgcctgattcttcataccttatggggactggttgactggggaccatttcataactatgcagcaccacgatacaacctgcttgccatgaccggtaacaacgccgccaacataa

SEQ ID NO: 57 - DNA, 255 bp, Salmonella typhimurium
caccagtacggagcctgctcatgcaacacagcattaaagacttgtggttgtatccctttccagaaattgatgtggttcatacacaggagccactgttaccggaaccggaattaacaacgcccggtcgatgtatctgctgccggcaaaacgtcaggcaccgtttcagactggatgactcatggccactcagacagcttaccgacacaatcagtgacacacgagttcgtcttaataaggccacagaacatctggata

SEQ ID NO: 58 - DNA, 255 bp, Salmonella typhimurium
tctggaaatgtatatccggaatgaagttgaccgaagagaagcgattctttttatcccgccaggggagttacggtcatgaaaagagaaggtttctggcgatatgcaacaccgccagtcaacatccagggcgtacctctgccgttcaccatgatttatctgtttatatgcccctttccctccaaaacaaccttctggatttgcaccggcatcattttatttttcgttattctcgaccgttcaggctggactgtcagg

SEQ ID NO: 59 - DNA, 255 bp, Salmonella typhimurium
tctgataaacaggaaattaaatgatgaagaaaaatcatattacccgcaccatcattgcatctgctgtattattttcctttaacgctgcagcagcgacgtcatattttgaagcgcgtaacgatgcaatgggtggtaccggggtagcatcttcccattatggtgtggcacctctggcaaacccggctttactgacaaagcacaacagcaatgatgatttcagccttcttctgccgtctgttggggcacaagttgctg

SEQ ID NO: 60 - DNA, 255 bp, Salmonella typhimurium
acgaacacggagtctccgttatgaaaaaaaactatctgacacttatactgccgtcattattgtccggctgtgccggaatttccggcagcaataacgtggcaccatcagatacgcctgctctggtttttgttgacggacaaatcagtgagagtgctggcgttctggcacttacgcaacaacgtctttctccacctaaaataactccccccccgagagtcagcgtgccagagacagtaaaaacagcacatccagtca

SEQ ID NO: 61 - DNA, 255 bp, Salmonella typhimurium
cgcacagttcatctctgcctttgtttcatggggtgttctttgtatattttacttactgtttaagcatgtacataaggagtgctttcattatgccaatgatacttgtaaagaagaatccccggggcaaagtgattcgggagcttagcagtgaggaagagactgcagtaaagacggtctgtggactgaaaaagccagcaaccatggcactacataacctggccaatgatattctccgggaaatgcgtgagtatgatg

SEQ ID NO: 62 - DNA, 255 bp, Salmonella typhimurium
gtaaagatgaatactcaagttgagtataaatggagatggtatgagaattttttgcgatgatggttctacaaatgtgaaacttgcctggtttgaaggcaagacgctgaaaagtgcggtatcagtgaactcttttcgccataactggaaagtcgagggcttaggcagcagtcgtacttataactatctgcttgatggccgtaaatatacctacgacccggtcagcgaagatgcgatcagcacgactcatattgagta

SEQ ID NO: 63 - DNA, 255 bp, Salmonella typhimurium
gcggtcgcccggttacaggtgcggcacggcctgatggaggccgcatgtgagaggagaattcccatgccaaactggtgcagtaaccgtatgcatttttctggtgaaccggcacagattgctgagattaaacgactggccagtggtgccgtcacaccgttttatcgccgcgccacaaatgaaggtattcagctgtttctggccggaagtgccggacttctgcagaccactgaagatgtgtggtttgaaccgtgcccc

SEQ ID NO: 64 - DNA, 255 bp, Salmonella typhimurium
tgatcgtttcatatcaggggtggtctggaggtcatgcggcgtgtcctctgcactcgccggaataaggaagtcgccggcggctccgcttttacccggccatgcggggcatggccttgtgggttttcagctctgtggcctcagcgtcgtgtgcgggctgtgccgtgcctccatcttagccgggctggcagggatgcaagggtacgcttcgccgctgcggtcacccggtccctccttcccgtctgccgtgattttccg

SEQ ID NO: 65 - DNA, 255 bp, Salmonella typhimurium
gtattgcaaggacgcggaacatgcctcatgtggcggccaggacggccagccgggatcgggatactggtcgttaccagagccaccgacccgagcaaacccttctctatcagatcgttgacgagtattacccggcattcgctgcgcttatggcagagcagggaaaggaattgccgggctatgtgcaacgggaatttgaagaatttctccaatgcgggcggctggagcatggctttctacgggttcgctgcgagtctt

SEQ ID NO: 66 - DNA, 255 bp, Salmonella typhimurium
ctgcgattggaccctctgacttggggttgatgttcatgccgcctgtttttcctgctcattggcacgtttcgcaacctgttctcattgcggacaccttttccagcctcgtttggaaagtttcattgccagacgggactcctgcaatcgtcaagggattgaaacctatagaagacattgctgatgaactgcgcggggccgactatctggtatggcgcaatgggaggggagcagtccggttgctcggtcgtgagaaca

SEQ ID NO: 67 - DNA, 255 bp, Salmonella typhimurium
gaaaactgaaggaacctccattgaatcgaactaatattttttttggtgaatcgcattctgactggttgcctgtcagaggcggagaatctggtgattttgtttttcgacgtggtgacgggcatgccttcgcgaaaatcgcacctgcttcccgccgcggtgagctcgctggagagcgtgaccgcctcatttggctcaaaggtcgaggtgtggcttgccccgaggtcatcaactggcaggaggaacaggagggtgcat

SEQ ID NO: 68 - DNA, 255 bp, Salmonella typhimurium
ttattattatagaagcccccatgaataaatcgctcatcattttcggcatcgtcaacataacctcggacagtttctccgatggaggccggtatctggcgccagacgcagccattgcgcaggcgcgtaagctgatggccgagggggcagatgtgatcgacctcggtccggcatccagcaatcccgacgccgcgcctgtttcgtccgacacagaaatcgcgcgtatcgcgccggtgctggacgcgctcaaggcagatg

SEQ ID NO: 69 - DNA, 255 bp, Salmonella typhimurium
gcctgcaaaggaggcaatcaatggctacccataagcctatcaatattctggaggcgttcgcagcagcgccgccaccgctggactacgttttgcccaacatggtggccggtacggtcggggcgctggtgtcgcccggtggtgccggtaaatccatgctggccctgcaactggccgcacagattgcaggcgggccggatctgctggaggtgggcgaactgcccaccggcccggtgatctacctgcccgccgaagacc

SEQ ID NO: 70 - DNA, 375 bp, Salmonella typhimurium
ttaacgctcatcccattcgtctgccgcagtacggccttcctcggtatcaagcgggggttcaagctggaattccccttcatcccattcatgcaaagtattctcttcctgccactcctggcggatctctatctcatcataatcgccgtcaaacacgctctgcgcggcttcaccactcagcatcggcagacattcgccatcttcaccttcatcggcgaaaaattcgacctgccacatgatgtccccatcctgcagtacatatttctgaacgttgaactgctgcacattcgcttcgtcttgttcgaggcctggatggtcagccagaaattcttcccgggctgcatcgatagcttcttccagcgtggcatacatggtcat

SEQ ID NO: 71 - DNA, 408 bp, Salmonella typhimurium
tcatctcattagcgaccgactaaaaacttccagatagttgtaaaacccattcaaggcagtagagaacttttcaccgtcagataaaaaatccggatgcactaaggctttaagcgttagctccccattctgctcccccagtagtaattgcccgccgcgggcaaaatggcatccttccattatggtcattaagatttcataagcccgctgttgtaataccaccatgctgtcagcacccaattgcgcccagatccatacatcatcgtccttgacgctgatacagatacttggcaatgcaaataaatccagaacaattgttgaatggctatctattcctccaattaatgaaggatcgcaaccacttacttccagtgcggaacgaactaattcagcgatatccaaatgttgcat

SEQ ID NO: 72 - DNA, 333 bp, Salmonella typhimurium
ttagcgcgggatatcgctggtcggctgggccggtgcagcaggttgagtctgctcggtcttcgccggcgcactcagattttcccactcgcttcctttattggttttgttgctattgatattacccaacaccagactgatgatgaagaacagcgtcgccaataccgccgtcattcgggtcatgaagttaccagaaccacttgaaccaaatagcgtagcggaagcgcctgctccgaaggaggctcccatatcagcgcctttaccttgctgcagcatgatcagacctacaaggccaattgccacaataaggaaaacaactaaaagagcttcgtacat

SEQ ID NO: 73 - DNA, 468 bp, Salmonella typhimurium
tcaggcatcctgatgttcttcagtaccttcgccagcctgctgctgcaaatagttcatgaacagcgcatcaaagttgaccggcgcaaggttcagttgcgggaacgtaccgcgtgaaaccaggctggtgatgcactcgcgagcatacgggaacagaatgttcgggcagtatgcgcccaggcaatgcgccatctgagtaccttcaataccgctgatggagaaaataccggcctgctgaacttcgcacaggaacgcggtttcttcccccagggaagccgttacggtaacacgcagcacaacttcataaacgtcatccgccagttgggaagatgccgtatcaagatccagtttaacctctggctgccaatctttctggaaaacatgcggtgcgtttggcgcttcgaaagaaacatccttggtatagatacgttggatctggaaagccatttcagtgttattttgttctgacat

SEQ ID NO: 74 - DNA, 549 bp, Salmonella typhimurium
gtgtttgatatcggttttagcgaactgctgttagtgttcgttatcggcctcattgtgttggggccgcaacgattgccagtagcggtaaaaacggtagcgggctggattcgcgcgttgcggtcccttgcgacaacggttcagaatgaactgactcaggaactgaaacttcaggagttccaggacagtctgaaaaaagtcgaaaaggcgagcctggaaaatctgactcccgaactgaaagcatctatggatgaactgcgtcaggcggcggagtcgatgaaacgcacctacagcgctaacgatcccgaacaagcgagcgatgaagcgcataccatccataatccggtggtaaaagggaacgaaacgcagcatgagggcgtcacccctgccgccgctgaaacacaggcgagcgcgccggaacaaaagccggagcccgttaaagctaacgtgcctgagtcgacggaaaccgcttccgtagccacgatagacgccgagaagaaatccgctgcgcctgttgtcgaatcttccccctcgtcgagtgataaaccgtaa

SEQ ID NO: 75 - DNA, 384 bp, Salmonella typhimurium
atgagtgcgaataccgaagctcaagggagcgggcgcggcctggaagcgatgaagtggatagttgttgccatattgctgatcgtcgcaatcgtcggcaactacctctatcgcgacatgatgctgccgctgcgtgcgctggccgtagtaattctgattgctgcagcgggtggtgtcgcgctgttgacgacaaaaggtaaagcaaccgttgcttttgcccgtgaagcgagaaccgaagtccgtaaggtcatttggccgactcgccaggaaacgctgcacaccacgctgatcgtcgctgcggttaccgcagttatgtcactgatcctgtggggactggatggtattctggttcgcctggtatcctttatcactggcctgaggttctga

SEQ ID NO: 76 - DNA, 390 bp, Salmonella typhimurium
tcacatgcccagtttctcaaagattttgttgagcttctcttccagagtcgctgcggtgaacggttttacgacataaccgctggcgccagcctgtgcggcggcgataatattctcttttttggcttccgccgtgaccatcaacacgggtaacgccgacatggcgctatcggcgcgaatggttttcagcagctccaggccatccatgttcggcatgttccagtcggagataataaaaccaaagccgcccgcctggagcttgttcagcgcatcgacgccgtcttcggcctcttccacattgttaaatccaagctcttttaagaggttgcgcacgatacgacgcatggtcgaaaagtcatccacaaccaaaaatttaagctctttatccgccat

SEQ ID NO: 77 - DNA, 351 bp, Salmonella typhimurium
tcatgcccttttcttacgcgccgtatcgtccacttcattgagcagacgcgttgaaagcatgatacctgtgtgaatctgctgtaagtcatcgacgcgcgaatcctgagtcaaacgggtgatcgtctgatgatcgtcaaaccggaaatgacaaactaactggttcgtctccgccagtttgaccatctgcggcagggtcaacgcgcccagtgtgtttgccatctcttcgttgataccgaggcggaacatcgcagatgctttgtcctggacgatcaaacgctgtgcaaggagtaaatatgacaaattgatgtcataaatgtgttttagcaactcggatgtatgcattgttcccat

SEQ ID NO: 78 - DNA, 369 bp, Salmonella typhimurium
atgacctcaaccgtggagtttatcaaccgttggcagcgtattgcgctgctcagtcaatcgctgcttgaacttgcgcagcgaggtgaatgggatctcttactgcaacaagaggtctcctatctgcaaagtattgaaacggtgatggaaaagcaaactccaccgggcattacgcgaagtattcaggatatggtcgccggatacatcaaacaaacgctggacaatgagcagctcctgaaagggctgctgcaacagcgactggatgaactgagtagtttgatcggacaatccacccgccaaaaatcactcaacaacgcgtatggccgtctttccggtatgttactcgtgccagatgcgcctggcgcctcataa

SEQ ID NO: 79 - DNA, 558 bp, Salmonella typhimurium
atgaaacataaattaatgacctctactattgcgagtctgatgtttgtcgctggcgcagcggttgcggctgatcctactccggtgagcgtgagtggcggtactattcatttcgaaggtaaactggttaatgcagcctgtgccgtcagcactaaatccgccgatcaaacggtgacgctgggtcaataccgtaccgccagctttacggcgattggtaatacgactgcgcaggtgcctttctccatcgtcctgaatgactgcgatccgaaagtggcggccaacgctgccgtggctttctctggtcaggcagataacaccaaccctaatttgctggctgtctcctctgcggacaatagcactaccgcaaccggcgtcgggattgagattcttgataatacctcttcaccgttgaagccggacggcgcgaccttctcggcgaagcagtcgctggttgaaggcaccaatacgctgcgttttaccgcacgctataaggcaaccgccgccgccacgacgccaggccaggctaatgccgacgccacctttatcatgaaatacgaataa

SEQ ID NO: 80 - DNA, 504 bp, Salmonella typhimurium
ttattcgatgttggattcgataaaccacaggaatttatcgaggtcgcgtgatgcggcggtaaagatatcggcagtgtcttcatctttggcttcaccaatagctttgcgaacatcattagcgacaacagcgtagcgatcggccagttcttttaagtgatcctgcacgttatggatgtcgagcggatagcttttcagtggagttttgctgttgataacttgcgtggtgcctaacgccacaccgccaagctgtacggcgcgctcggccatagtatccagatgatcggtcagtgcggtacggaagccatccagcatctcatgaacggcaataaagttagcaccgcgcatgttccagtgggcctgtttcgtgatcagcgacaggtcaatgaactggatcacctgacgattaagcaactcaaccgtcgcttttttatcgctctctgatacatcgttacgggtataaagcagattagacgcttttgtttttaccagtttagcggtactcat

SEQ ID NO: 81 - DNA, 435 bp, Salmonella typhimurium
atgaacagaacgattcttgtacccatcgatatttcagattcagaattaactcaacgcgtgatttcgcatgttgaagctgaagcaaagattgacgacgctaaagtgcactttttgactgtaatcccgtctttgccctattacgcttcactgggactggcttattcagcagagcttcccgcaatggacgatttgaaagccgaagccaaatctcaactggaagcgattatcaagaaattcaaccttcccgcggaccgcgtgcaggcgcacgttgcagaaggctctcctaaagataagattctggaaatggcaaaaaaattaccggccgatatggtgattatcgcctcgcatcgcccggatattactacctatctgttgggttccaacgccgcagccgttgtgcgtcatgcggaatgctccgtactggtggtacgctaa

SEQ ID NO: 82 - DNA, 219 bp, Salmonella typhimurium
aatagcgttatagttaacccgcttattctcagggcggggcgaaattccccaccggcggtaaatcagcgatgtttaacgcatttctcatcacggcgcgccgtgacggaacgcggagagcaggttgaaagcccgcgagcgctttttgccatagcgaaaaggtcagcagatccggtgtaattccggggccgacggttaaagtccggatgggagagggtaacg

SEQ ID NO: 83 - DNA, 255 bp, Salmonella typhimurium
gcagtggaataatgatgcggtttccgcaccgaaacttgttaaaacaaaaagtttagcggaataacccattttgtctgaccgatcatcaacgcagcaatggcgtaagacgtattgatttttcagacagttagcgggctgcgggttgcagtccttaccggtagataggatcttctctggagagtaatgcccaggctgcttccctgataattgcgctgtgtttccgtatgaaatacaggcaaccgacactctgcgcct

SEQ ID NO: 84 - DNA, 255 bp, Salmonella typhimurium
ttctatcttcgtcgacagggagtcgtacaacgaagcgaacgtcaggatgatgacgcttcagcaggacacgccaggatggtgttacaaggaaaggcttcaggatgaagcaaagtggaaagcgcaggatgcgttaaaggacacctccaggacggagaacgagagccgatcaggatgttcggcgggtctggatgaccagggacgcttcaggaagaagctatcacatcgggcgatgtgcgcaggatgcaaacgttcagg

SEQ ID NO: 85 - DNA, 219 bp, Salmonella typhimurium
ttaacgaatgaatttccatactgaagaggggatcttgtcgtagagtttgttcatcgtcaattctgcaagacggtgatccgcagctgagtaaaatacagccagctcattgtcggacaattcatatttatttttctcaatgacgcgctccagagtgtcaattgtctgacagcgccgtaaacgcatcaaataatcagttttagttaatggtttatcagacat

SEQ ID NO: 86 - DNA, 903 bp, Salmonella typhimurium
ttaatgtttttttgtgatgtgctcaatgagctcagcaaatccgctattattcagcgaagccctattatacataagatagaattgtatgggagcaatggtaaaaggtatggtgacttttttaagtttgatagaggaagagtaatagtcaaaaaatgtttgtggtaaaaaaccaataagctccgtggagctgatagagttggcgatggtcatcagcgatttgcttctgaaaccaattattctttcccccagcacatcatccataagtgaatgatattctttcataccggttgcccgggagacgagttgcgtaaatgactcttgtagaatttcgtcgatagtggcggtgtcgcctagtcggggatggttttcactgcaaaccaggatgcattctagcctattaaagtgagtacaaacaatagaacgattattcagtggggccattgaaaccacaatatctgctttgcggtaggcaagcagatcttcaggcagttcgtcagtggtcaaaatgtcgtgatgttcaatttcaacctgtggatctttgcggatatatttaactaatttcatcacatattgggtgatcaacagctgtgggctgtagataataaattttttcttcaggctggactgattcattatattaatagtttgttccaggctgttaagattattttctaaatgataatgtaaattaatgcctgttacggtaggcgtaattcctttgcctgaacgaataaatagagggtcgttgaattgcgtgcgcaggcgttgcaatgactggcttacggcagaaggtgtaatatagagtgtttctgctgctttgctaatgcttaaatgttgatagatacattcaaatataaccaacaggttaagatcaaattttttaaggtcgtaaaggttagccat

SEQ ID NO: 87 - DNA, 495 bp, Salmonella typhimurium
atggtagatagcaagaagcgccctggcaaagatctcgaccgtatcgatcgtaacattcttaatgaactgcaaaaggatgggcgtatttccaacgtcgagctttctaaacgagtaggactttcgccgacaccttgccttgagcgtgtgcgtcggctggagcgacaggggtttatccagggctatacggcgctgttgaacccgcattatctggatgcgtcacttctggtattcgttgagattaccttaaatcgcggcgcgccggatgtgtttgaacagtttaatgccgccgtgcaaaagcttgaagagattcaggagtgtcatttggtttccggcgatttcgactacctgttgaaaacccgtgtaccggatatgtcagcgtatcgaaaactattgggagagacgttgctgcgcttgccaggtgtgaacgacacccgaacttacgtagtgatggaagaggtaaaacagagtaatcgtctggttattaagacacgctaa

SEQ ID NO: 88 - DNA, 441 bp, Salmonella typhimurium
atgaaattggaatcgccactaggttctgatctggcacggttggtgcgcatttggcgtgctctgattgaccatcgcctcaagcctctggaattgacgcagacacattgggtcacgttgcacaatattcatcaattgccgcctgaccagtcgcagattcaattggctaaagcgataggcattgagcagccatcgctggtacgcacgttggatcaacttgaagataaggggctaatttcgcggcaaacctgcgccagcgatcgtcgcgctaagcggattaaactgaccgaaaaagcggacgcgctgatcgctgagatggaagaggtcattcataaaacgcgcggtgaaattttggctgggatttcttcagaggagattgagcttctgattaaacttatcgccaaacttgaacacaatattatggaattgcactctcacgattga

SEQ ID NO: 89 - DNA, 795 bp, Salmonella typhimurium
atgttaaaattgacaaatatcaattacggcttgagcagacctatgatcccggaaaagcgaattatacggcgcattcagtctggcggttgtgctatccattgccaggattgcagtatcagccagctttgcatcccgttcacacttaacgagcatgagcttgatcagcttgataatatcatcgagcgcaaaaagcccattcagaaagggcaaactctgtttaaagcaggtgatgaactgaaatcgctctatgctatccgctccggaacgattaagagctacaccattaccgagcaaggcgatgagcagattactggattccatttagcaggcgacctggtgggttttgacgccattggcagcggtcatcatccgagctttgcacaggcgctggaaacctcaatggtatgtgaaatcccctttgagacgctggatgacctgtccggcaaaatgcctaacctgcgtcagcaaatgatgcgtctgatgagcggtgaaattaaaggcgatcaggatatgatcctgttattgtcgaagaaaaacgccgaagaacgtctggccgcgtttatttacaacctgtcccgccgctttgcgcagcgtggtttttcaccgcgtgaattccgcctgacgatgacccgtggcgatatcggcaactatctgggcttaacggtcgaaaccattagccgtctgctggggcgtttccagaaaagcggtatgctggcggtgaaaggtaagtatattactattgaaaacagcgatgcgctggcggccctcgccggtcatacccgcaacgtcgcttaa

SEQ ID NO: 90 - DNA, 576 bp, Salmonella typhimurium
tcaacgcctgataagcggttgaactttattatcaatagcttcccgcgcccggaagatacgtgaacgcaccgtccccaccggacaatccatgatagccgctatctcttcatagctcaggccatccagctcccgtaaggtgattgccatacgtaaatcttccgggagggactcaatagttcggaaaactatctgtctcagttcttctgacaacattaagttctcagggttcgaaatttctttcagcgcgccgccgctttcaaagttttctgcttcaatcgcgtctacatcactggaaggcggacgacgcccctgcgcaaccaggtagttcttcgcggtattgaccgcaatacgatacaaccaggtataaaaagcactatccccccggaaagaatccagcgcgcgataggccttaataaatgattcctgtacgacatcgggaacgtcgcccgatggcacatagcgggaaaccagactcgccactttatgctggtagcgcactaccagtaagttaaaggctttctgatctcccttctggacccgttcaaccaggacctggtccgttaactgctcgctcat

SEQ ID NO: 91 - DNA, 633 bp, Salmonella typhimurium
atggtgcttggcaaaccgcaaacagacccgactcttgaatggttcttgtctcattgccacattcataagtacccgtcaaagagcacgctgattcaccagggtgaaaaagcagaaacgctgtactacatcgttaaaggctccgtggcagtgctgatcaaagatgaagaagggaaagaaatgatcctttcttatctgaatcagggtgattttattggtgaactgggcctgtttgaagaaggccaggaacgcagcgcctgggtacgtgcgaaaaccgcatgtgaggtcgctgaaatttcctacaaaaaatttcgccaattaatccaggtcaacccggatattctgatgcgcctctcttcccagatggctcgtcgcttacaagtcacctctgaaaaagtaggtaacctcgccttccttgacgtcaccgggcgtatcgctcagacgctgctgaatctggcgaaacagcccgatgccatgacgcacccggatgggatgcagatcaaaatcactcgtcaggaaatcggccagatcgtcggctgctcccgcgaaaccgttggtcgtattttgaaaatgctggaagatcaaaacctgatctccgcgcatggcaagaccatcgtcgtctacggcacccgttaa

SEQ ID NO: 92 - DNA, 876 bp, Salmonella typhimurium
tcaattaacatattgatgacgagaggaagataaaaacgctaaaaattccgatggtgtagttttgaaatgttttttaaaaacgcatgtaaaataagaagcactatcataaccacacatataagccactcgagtaatattatattcactattgcgtggaagttttgtcgctttattcattcgcgcattaaggtaaacttcgctgaatgaggtgtgctcttgtttcaatttcctttttaatgtggaacaactcatatagagtgagtcagaaatatccttgagcgcccattttcgacttatgtcgcttataataatattatagatgttttcggctaatgtattttgcgatagttctctgaagagagcaaatgcttcaggttcatagatgaactctgaaagcagaaatcttattaaatattcctttttatcttgggataatttctggcttttatttgaagagtgtaagaggttgaatactcttgctacgcctgtttctattggcgctaacagatgttttgtcgtcggttttgttaatggggccgaaaagtctgcatgttcatacagaaaaaaattataagcattttttattgacgctgaatctaattcaattaaattataatttaactgttcatgagtctcttccatagtgatatgaatggtttgatctttagctaaaaatattaacattggccctgatgccgtaatatactccccggacgatgtcgtaattgaaattttacccgtggtgagcttgatgagtacggactgcagtaaatttaatccctgaagtgataaggatttcctctgccagttttgcgctgattgtaaacattcaatgctccccacctggacaggtgagggattaaatacttttagcat

SEQ ID NO: 93 - DNA, 309 bp, Salmonella typhimurium
atggctaaggggcaatctttacaagatccgttcctgaacgcattgcgtcgggaacgtgttccagtttctatttatttggtgaatggtattaagctgcaaggtcaaatcgagtcctttgatcagttcgtgatcctgttgaagaacacggtcagccagatggtttataagcacgcgatttctactgttgtcccgtctcgcccggtttcccatcacagcaacaatgccggtggcggcgccagcaataactaccatcacggtagcaacgcgcaggggtctactgcgcaacaggacagcgaagagactgaataa

SEQ ID NO: 94 - DNA, 726 bp, Salmonella typhimurium
atggcaactgtttccatgcgcgacatgctcaaggctggtgttcactttggtcaccagacccgttactggaacccgaaaatgaagcctttcatcttcggcgcgcgtaacaaagttcacatcatcaaccttgagaaaactgtaccgatgttcaacgaagctctggctgaactgaacaagatctctgctcgtaaaggtaaaatccttttcgttggtactaaacgcgctgcaagcgaagcggtgaaagaagctgctaacagctgcgaccagttcttcgtgaaccatcgctggctgggcggtatgctgactaactggaaaacagttcgtcagtccatcaaacgtctgaaagacctggaaactcagtctcaggacggtactttcgaaaagctgaccaagaaagaagcgctgatgcgtactcgtgagcttgagaaactggaaaacagcctgggcggtatcaaagacatgggcggtctgccggacgctctgttcgttatcgatgctgaccacgagcacattgctatcaaagaagcgaacaacctgggtatcccggtatttgctatcgttgataccaactctgatccggatggcgttgacttcgttatcccgggtaacgatgacgcaatccgtgctgttagcctgtacctgggcgctgtcgctgcaaccgttcgtgaaggccgttctcaggatctggcttcccaggcggaagaaagcttcgtagaagccgagtaa

SEQ ID NO: 95 - DNA, 261 bp, Salmonella typhimurium
atgaaacctgatattcatcctgtataccgcaccgtcgtatttcacgacaccagcgcaaatgaatatgtgaaagtgggatcaactatcaaaactgaacgtgaaatcgaactggacggcgtgacatatccgtatgtcactattgatgtgtcatcaaaatcgcatcctttttataccggtagacagaaaacgtttgatagcgaaagtagcgccgcacgcttccagaaacgtttcggtcattttatcggcgctaaacgggggtaa

SEQ ID NO: 96 - DNA, 549 bp, Salmonella typhimurium
ttaaaaaccaggatcccagtctacttcgatagtacgagtagcgagatcgactttcttgataacctgcccatcgaggaacggtactagtcgttccttgataccaaatgcatctttcaggttcgccttaatgacgagaacgtcattcgacccggtttccatcatgtcgataactttaccgagatcgtagccttcagcggtgactacctggcagcccatcaggtctttccagtagtagtctccctcctcaagcgcaggaagttgcgaggaatccacgacaatttcgcaattggtcagaagattcgcggcatctcgatcgtcaacgcctttcagcttgatgatcagatcctgattgtggtgcttccagctttccagctgtacctgctgccactgacccgccttctggataaaccagggctgatagtcaaaaatgctttcggcgtcttcagtggaggaaaacactctgagccaaccacggataccgtatgaagaacccattttccccagtacaaccggttcagcgggtacttgtgcggcgagttgcttgctcat

SEQ ID NO: 97 - DNA, 429 bp, Salmonella typhimurium
ttagatgtcaagaacttgcggttgctgtgccgcgtggttgtgctcgttgcccgcgtaaactttcagtttacggaacatagcacgacccagcgggccttttggcagcatgcctttaaccgcgatttcaatcacacgctcaggacggcgggcaatcatctcttcaaaggtcgcttgtttgataccaccgatgtggccggtgtggtgatagtacactttgtcagtacgcttgttgccggttacagcaactttgtcagcgttcagaacgatgatgtaatcaccggtatctacgtgcggagtgtattccgctttgtgcttaccgcgcaggcgacgagccagttcagtagccagacggcccagagttttaccggtcgcgtcaacaacataccagtcgcgttttacggtttctggtttagctgtaaaagttttcat

SEQ ID NO: 98 - DNA, 534 bp, Salmonella typhimurium
ttacttcttcttagcctctttggtacgcacgacttcgtcggcgtaacgaacacccttgcctttgtaaggctcaggacgacggtaggcgcgcagatctgctgcaacctggccgatcacctgcttatcagcgcctttcagcacgatttcagtttgagtcggacattcagcagtgatacctgccggcagctgatggtcaaccgggtgagagaaacctaaagacaggtttactacattccctttaaccgctgcacgataacctacaccaaccagctgcagcttcttagtgaagccttcggtaacaccgataaccattgagttcagcagggcacgcgcggtaccagcctgtgcccaaccgtctgcgtaaccatcacgcggaccgaaggtcagtgcattatctgcatgtttaacttcaacagcatcgttgagagtacgagtcagctcgccgtttttacctttgatcgtaataacctgaccgttgattttgacatcaacgccggcaggaacaacgaccggtgctttagcaacacgagacat

SEQ ID NO: 99 - DNA, 540 bp, Salmonella typhimurium
ttacttgcggaacgggaagtcaaaggcagccagcagagcacggccttcttcgtcagatttcgcagtagtggtaatggtaatatccaaaccacgaacgcggtcgactttatcgtagtcgatttctgggaagatgatctgctcacggacacccatgctgtagttaccacgaccgtcgaatgacttagcggacaagccacggaagtcacggatacgaggaacagcaatagtgatcaggcgctcaaagaactcccacatgcgttcgccacgcagagttactttacagccgatcggatagccctgacggattttgaagcctgcaacagatttgcgtgctttggtgatcaacggtttttgaccggagattgctgtcaggtctgctgctgcgttatccagcagtttcttgtcagcgatcgcttcaccaacacccatgttcagggtgatcttctcgacccgagggacttgcatgacagaattgtagttaaactcagtcatgagtttgttaactacttcgtctttgtagtaatcatgcagtttcgccat

SEQ ID NO: 100 - DNA, 372 bp, Salmonella typhimurium
ttagagtacttctggtgccagagagataattttcatgaacttctcgttacgaagttcacgagttaccggcccaaaaatacgcgtaccgataggctgctcgctgttattgtttaaaataacgcatgcattaccatcgaagcgaatgacagaaccgtccgggcgacgaacacccttcttggtgcgcaccactaccgccttcagcacatcaccttttttgaccttaccacgcggaatcgcttctttgatggtgatcttaatgatgtcgcctacgcctgcgtagcgacggtgcgagccacccagaaccttgatacacattacgcgacgtgcaccggagttgtcggcgacgttcagcatagtctgttcttggatcat

SEQ ID NO: 101 - DNA, 411 bp, Salmonella typhimurium
ttacatcaccgtcttagttacaaaggtggttttaatcggcagtttcgctgctgccagcttgaatgcttcacgggccagctcttccggtacgccgtccatttcatacaggactttacccggctgaatcaaggcaacccaatactccacgttacctttacctttacccatacgcactgccagcggcttttcagtgatcggtttgtccgggaatacacggatccagatcttaccttgacgcttaactgcacgggtcatagcacgacgtgctgcttcgatctgacgggcagtcagacgaccacggccaacagctttcaggccgaagctgccgaagctaacatccgcgcctgcagccagaccacggttgcggcctttgtgcattttacggaattttgtacgctttggttgtaacat

SEQ ID NO: 102 - DNA, 279 bp, Salmonella typhimurium
ttatttcttcttcgcttttttatcagcagcgtggccgcgataagtacgagtcggtgcgaattcacccagtttgtgaccgaccatttcgtcggaaacaaataccggaacgtgctgacgaccattatggacagcgatggtcaaaccgatcatgttaggaaagatcgttgaacgacgggaccaagtgcgcaggggcttcttgtctccgctttccaccgctttctctaccttcttcagcaagtgcaggtcaataaaaggacctttcttgagagaacgtggcat

SEQ ID NO: 103 - DNA, 303 bp, Salmonella typhimurium
ttactcagcgccgccgacgaagtccagattctggccttctttcagggtgacgtaagcttttttccagtcgctacgacgaccgatacgctgtccgtgacgtttaactttccctttaacgaccagggtgttaacgacttcgacttcgacttcaaacagtttctgcacagcagctttgatttctgctttggtcgcgtctttagcaactttgagaacgatggtgttggttttttccatcgcagtagacgctttttcagaaacgtgcggtgcgcgcagcaccttcagcagacgttcttcacgaatcat

SEQ ID NO: 104 - DNA, 606 bp, Salmonella typhimurium
tcatgccagcatctcctcaacttgcttaacagcatcagcagtcattacgactttgtcgaaggcgatcaggctaaccgggtcgataccagtcgcatcgcgtacgtcaaccttgtgcaggttacgtgcggccaggaacaggttctcgtccagctcaccggtgatgatcagcacatcttccagagccatgtctttcagtttctgtgccagcagcttagttttcggcgcttctacagaaaacttctcgacaacgatcagacgatcctgacgtaccagttcggacaggatgcttttcagcgcgccgcggtacatcttcttgttaactttttgactgtggtcctgcggacgagcagcgaaggtcacgccaccggaacgccagatcgggctcttgatagaacctgaacgcgcacggccagtgcctttctggcgccacggttttttaccggaaccagttacttcagcacgagtcttctgagcacgagtaccctgacgagcaccagctgcataagcaacaacaacctggtgaaccagcgcttcgttgaaatcacgaccgaaggtagtttcggaaacagtcagcgcgctctgcgcgtctttcaatactaattccat

SEQ ID NO: 105 - DNA, 375 bp, Salmonella typhimurium
ttaagccttaggacgcttcacgccgtacttagaacgagcttgcttacggtctttaacgccggagcagtcaagcgcgccacgaacggtgtggtaacgaacacccgggaggtctttaacacgaccgccacggatcaggatcacggagtgctcctgcaggttgtgaccttcaccaccgatgtaggaagtcacttcaaaaccgttagtcagacgaacacggcaaactttacgcagtgcggagttcggttttttaggagtggtagtatatacacgagtacatacgccacgtttttgcgggcatgcttccagcgcaggcacgttgcttttcgcaactttgcgagcacgtggtttgcgtaccagctggttaactgttgccat

SEQ ID NO: 106 - DNA, 705 bp, Salmonella typhimurium
atggctaaactgaccaagcgtatgcgcgtgatccgtgaaaaagttgatgcgaccaaacagtacgacatcaacgaagctattgccctgctgaaagagctggccactgctaaattcaacgaaagcgttgacgttgccgttaacctcggcatcgacgctcgtaaatctgaccagaacgttcgtggcgcgactgtactgccgcacggtactggccgttctgttcgcgttgccgtatttacccaaggcccgaacgctgaagcagctaaagctgctggcgctgagctggtaggtatggaagatctggctgaccagatcaagaaaggcgaaatgaacttcgacgttgttatcgcatccccggatgcaatgcgcgttgttggccagctgggccaggttctgggtccgcgcggcctgatgccaaacccgaaagtcggtaccgtaactccgaacgttgctgaagcggttaagaacgctaaagcaggtcaggttcgttaccgtaacgacaaaaacggcatcatccacaccaccatcggtaaagtggactttgacgctgacaaactgaaagaaaacctggaagctctgctggttgcgctgaaaaaagcaaaaccgagccaggcgaaaggcgtgtacatcaagaaagttagcatctccaccaccatgggtgctggcgttgccgttgatcaggctggtctgagcgcatctgcgaactaa

SEQ ID NO: 107 - DNA, 396 bp, Salmonella typhimurium
atgcgtcattacgaaatcgtttttatggtccatcctgaccagagcgaacaggttccgggtatgatcgagcgttactctgccgccatcactggcgcagaaggcaagatccaccgtctggaagactggggccgccgtcagctggcttacccgatcaacaaactgcacaaagcgcactacgttctgatgaacgttgaagcgccgcaggaagtgatcgatgagctggaaactaccttccgcttcaacgatgccgttatccgcagcatggttatgcgtactaagcacgctgttaccgaagcttctccgatggttaaagcgaaagacgagcgccgtgagcgtcgcgatgatttcgctaacgaaaccgcagatgatgctgaagctggggattctgaagagtaa

SEQ ID NO: 108 - DNA, 561 bp, Salmonella typhimurium
tcaattggtgaaaggaataacgatttcaccaggtttaacttcaatgcctttcgcgagtttctttgctaacgcttcgcctttactgctgtcctcacgcaacacgtaagcgggccgctggttaaagtagctacgtaaagactgatttaaataaggcaggagcgtttgtagcaccgattgcattttctccggcgtcacggtggcgtctactacttccatctcctgaagatagatggcgcctttttctttatcaaagaccggcagggcttttagcttgagtttcatcgtcgctttttgactgccaaacagggaattcatatccagcctggcatcgccagtaagggtgactttattaggttcttcccgaccaatctggctgacaaggttagtcaatacgatatgcgcgtcggcaatgccgggcagaccaatatcttttgagaaattattccgtttttcaagcgcttgattgatttcttgttcgctaatggtgtattgcgtaagttgattacaacccactaacaggccgctaactaccagcgcagcggcaaaaaaaaactttttcat

SEQ ID NO: 109 - DNA, 345 bp, Salmonella typhimurium
ttagttagctaaggaacagttactgagaacaggtttatcatcaccttccaccagttcagccgttttgcctttggtataaagtttataagtataatttttgtctatggcttcgtaatttgctccggaggccattttcattaaccgcatcgggatcatctcgtttacctgactgataatcgcataggcgtttccagcctcggtgttgacgtaaatcacctccataacctggttatcattacaggtgtatatagatttagaaatctcctgcgaagctgctatagaggtggtactggcgctaagcgcagcgagaaagagggtaaatgggatcaatttacgtttcatcat

SEQ ID NO: 110 - DNA, 855 bp, Salmonella typhimurium
ttagcgaattgttttaggcgtcatcacccggcgggcgccgacataatgacgttgccagtattcttcgttcagtgaggtgatcttaatttcctgaccgctgcgcggagactggataaacttaccgttgccgacatagacgccaacgtgatcggcggtgccgcgcccctgcgtacggaagaacaccagatcgccgtttttcaactcgctacgctcaatgggcgccgcgtcacgcaggtgatacatctcattcgccgttcgggggatacggatcttcactaaatctttataggcataataaaccagaccgctgcaatcaaaaccggtgcgcggcgacgcgcctccccagtgatacggtttaccaatctgattcatgagtttggacatcgcggttttcgtcgctttttgtacttttgcacgatgcgcatcggcaatagagaccggcaatgttcctttccccttcacgcagtgcggcttacggcctttacgcgtcgtgcatttttccgttacgtcgagggcggcgattgacgtgggcgcggttctgttacgacgatgcgtcgtatgacgagatttcgtggaggcggtggtacgttttggcgtagaagcggaagaagaacggctggtttttgaggttttttttacgttttttttgctggttttactgatctttttcgttgtgcttttctttttatctgccgttttcgtgacatgagaaacagcaggcgtcgctttggcttgcctggaagcatgggccattggcgtaaaggggagagtagtaaaaagtaaagcacagagcgtgatcgagattttgtttatccgcgccactgagcaatcctctgttaaaggcaggcgattcat

SEQ ID NO: 111 - DNA, 441 bp, Salmonella typhimurium
ttacggattaacaaacgttgttttaacgcgcgctgaacgtttgagataaggcacaatgagcgccgttgccaacagtgggaagagtaactgacgcacggcaaaggcatctgagacgggcgaaaaggcaaatgctttaaccgccagtaacaccgacaccagcagccagataatgtaatgcttcggcacgcagcgtctgcgcttgaagaatgcgatcgtcaaccacagggtatagtaccacatggcgatagcggtaataaatgaaatgccccatagcagtaaattaccggtttcctgtccgctaagcgtcttgaacgtttgcggtgtggcaagcgccataacgtagagtaataacgccagcgaggcgctcaacaacgcgactaacagccaggctaacgggccaagaagccagcctccaattcgttgtggcggtgttgtagtcat

SEQ ID NO: 112 - DNA, 639 bp, Salmonella typhimurium
ttagaaacgatagcctgccgagaacataaatacccatgggtccagacgcacgctgtcatgatgctgaacgccgcccattttataattggcggtagtatcaatatccatgtaccagacagaggcgccaattaaccagtcgcggttaatcaggtaatctaccccaacttgccctgccgcgccccaggaatccttaaagctcagatcggacagcccggcatttttaccattatcgttaaagtcgttatcgaagaaggtggtgtagttcacccccacgccgacataaggacgcactttgctgctggaatcgccgaagtaccactgcgccattaacgttggcggtaacaggtggaccgtggcgatatcgcccgtcgcgcccgtacccaccttatggcggaacggcgtagccgccagcaattcaaccccgatattgtccgtcgccatgtaagtgaatgtcaggccgagttgcgtgttattactcacatcaaacccgtttaaatgccccagcgtaccacccgccccttctgtaggtctgacggttgccggacctgcacgcataaagaattctccggcttcgtgcgcgaacgcgctgcctgagagaagagttgttaacgccagtgccgccactgtaaattttttcat

SEQ ID NO: 113 - DNA, 735 bp, Salmonella typhimurium
gtgagtggttacaatgagcagttcctgaaaaaaaatccattagcgatattaggcgtgctacgggatttaaataaaaatcaggttccactgcgtatttcatgggcgcatggtcaattcatcagtaaaattttggcggtagacccggaaaaactcatcgtggattacggcagccaggaatacgaaaatagcgccgtattacgtgccgggcaggtagccattatcgcagaaacgcagggcgcaaaagtcgagttcacgttgccgcaactcgttacaggcgaatatcagcggctgccggcctttatcacgcccctgccgtcgtcactgtggtttgtccagcgccgggagtattttcgcattggcgcgccgctgtatccgccttattacggcgtcaccacgctaccggacacccgtacgttacgttttcgcctgtttgatctttccctgggcggcatgggcgcgctactggaatccgccatccccgacggactaatcgaaggcgcacgcttttcgcaggttgaactgaacatggggcaatgggggatttttcacgttgacgcccagcttatctccatcagcgagcgtaaggtgattgatgggaaaaatgaaacgatcaccactccccgcctgagctttcgtttccttaacgttagcccggcggtggagcgggagttgcagcggattattttttcgcttgagcgcgaggcccgagaaagagcgaataaagtgcgagaataa

SEQ ID NO: 114 - DNA, 261 bp, Salmonella typhimurium
ttaatgtagagtgaacgcaggcttgttacgttcttcgccttgataatacccttgaagaacccagcctgatcccgcccatatcgctgggccaacgttaaggaaccctttgtgagtcaggccaacagtatgcgaaaacgacatcgatttaacactcgcatgacccgtatcgtactgcttatcagttttctcttcttctttggacgtttcgtctactcttctatcggcgcctggcagcaccatcaggataaaaaagaagcgcaa

SEQ ID NO: 115 - DNA, 339 bp, Salmonella typhimurium
atgcgctgtaaaacgctgactgctgccgcagcagtactcctgatgttgaccgcaggctgttccactctggagcgagtggtttaccgacctgacatcaatcaggggaactatcttacacctacggatgtcgccaaagtgcgtgttggtatgacgcaacaacaggttgcgtatgctttaggcacgccgatgatgaccgatccttttggtacgaacacctggttttatgtcttccgccagcagccaggacatgagaacgtgacgcagcagactctgacgctcacctttaacagcagcggcgtgttaaccaatattgataacaaaccggcgttgacgaagtaa

SEQ ID NO: 116 - DNA, 339 bp, Salmonella typhimurium
atggaggatcatatgcttaacaaaccgaaccgaaacgacgtcgatgatggtgttcaggatattcagaatgatgtcaatcgattagccgacagtctggaagatgtccttaaatcctggggaagcgatgcgaaagacgaagccgaggctgcgcgacgtaaagcacaggcgttgctgaaagagacccgggcgcggatgcagggtcgtactcgcgtaaaacaagccgcctgtgatgcgatggggtgcgcggatacgtttgtgcgtgaaaaaccctggtgtagcgtaggaaccgccgcagcggtggggatttttatcggggcgctgcttagcctgcgtcgctaa

SEQ ID NO: 117 - DNA, 600 bp, Salmonella typhimurium
tcaacaggcgaaagcggggacggtattgggatatttttgagcatattgtaaggccagtagcaaaattgacatttctacagcatcctgcttcaatgcctcctcaataaatggaggaaaaagcaaaggaaaacgctgtgctaaagattcaggtaaaaattcatttagggcatttaactgtgcatacccgacgctaagtaaaaaccggtgattcggcgccttattgcagacagataaacttgttccctgatgcattgccaaaaatgcttgcgcccaatccggcaggccaagcaaggctccctgccttgccagatcggctctcagtttatggcaaccgagtaaatacgctacttgcggcagtcggcgccactgacgcagccacagctgcgtcagtgagttttgaatacactccttttctccgttcttaagccgccatgccgccagtattaactcatttgccgccgccctggcggcgggtctgacaatcatttccggcgctatctgcaaccgctgaggatggatatacgataacggatcaaaaatgattctttgccagataatgggtaatggctgcctattcatttgacgatttcgccttatcat

SEQ ID NO: 118 - DNA, 720 bp, Salmonella typhimurium
ttacttcaggctgccaaccagcgctttgcggctatcttctaaggtcactacgcggctacagacatctttgccaaactgctggaaatctttctcctggtttttccattcgttctggatagcggtttgcaaaccacctagactgcccatcacgccctgtaaaggattgccgccgcctttaagcaccgctttggcgcccatttcgttaatgctgtcctgcaaaataccgcccatcgcctgattcaccaactgctgaccgtcggcacgcacctggtcgatagccttatagtggaacgtcaggccgtccgtacgatgttcgataatgcggttcatttgcgcttttaattgcgcatcaagcttcgtcagacggctacgcatgttgctgctttcgcccacctctttagcgatgattttatccagcgccacgcggcctttttcgacgcgcgatcgggcgccctcatcaatccacggcagcgcgcttcgcagttccgcctggtaatctttcgcctgctcgcgctgcgcggcgctaagggtgtactgcttaccgttgtacatcacattgccgtccggcgtgatcaccaggttgccgttttcacctttcacctgcaccgtttgtggactcaggatcacatcgtcacgcggcgtgacgctgcatttgtaatctgcatgagcggccatcgccgtaaacgttagcactgtcgccagcagcgttttgcgcatcat

SEQ ID NO: 119 - DNA, 369 bp, Salmonella typhimurium
atgaaataccgcatcgctttggctatcacgctttttacacttagcgccggtagctacgctaattcgctttgtcaggaaaaagagcaggatatacaaaaggaaattagctacgctgaaaagcacaacaatcagcgccgtattgagggtctgaacaaggcgctcagcgaagtacgcgccaattgtactgacagcaagctgcgcgccgagcatcagaaaaagatcgctgagcaaaaagaagaggtagccgaacgccaacgtgatttagccgaggcaaaagcaaaaggcgatgcggataaaatagacaaacgtgaacgtaagctggccgaggctcaggatgagctaaaaaaacttgaggccagagactactaa

SEQ ID NO: 120 - DNA, 306 bp, Salmonella typhimurium
atgtcgaaagataacactacggaacatctgcgcgctgagttgaaatccctgaccgatacgcttgaagaagtgctgagctcttcgggcgaaaagtcgaaagaagagttgagtaagattcgtagcaaagccgagcgcgcgctgaaagagagccgttaccgcctgggcgaaacgggtgatgtgattgccaaacagactcgcgtcgccgccgcccgcgccgatgattatgtgcgcgaaaatccctggacaggcgtaggcattggcgccgctgtcggtctggtgttgggcgtactgctgacgcgtcgttaa

SEQ ID NO: 121 - DNA, 300 bp, Salmonella typhimurium
gtgagcagcaaaggcgaacgcgaaaaacgtaaagcgctgcttctcagtcagatccagcagcaacggctggatctgtccgccagccgtcgcgactggctggagaccaccggcgcgtacgatcgcggctggaatacggtgttaagcctgcgctcctgggcgctggtcggtagcagcgtaatggccatctggaccatccgtcatcctaatatgttggtacgctgggcgaaacgcggcctgggtatctggagcgcctggcgcctggtaaaaactaccctccgtcaacaacagctccgcggttaa

SEQ ID NO: 122 - DNA, 405 bp, Salmonella typhimurium
atgttcatgacctgggaatatgcgctaattggattagtcgtcggtatcatcattggtgccgtggccatgcgttttggtaatcgtaagttacgtcaacagcaggcattgcagtacgaactggaaaaaaacaaagctgagctggaagagtaccgtgaagagctggttagccactttgcccgcagcgcggaactgctggataccatggcgcatgattaccgccagctgtatcagcatatggcgaaaagctccagcagcctgctgccggaaatgtctgcggagtcgaatccgttccgtaaccgtctggcggagtctgaggcgagcaacgatcaggcgccagtacaaatgccacgtgattattctgaaggcgcgtctggcctgttacgtagcggcgcaaagcgcgattaa

SEQ ID NO: 123 - DNA, 321 bp, Salmonella typhimurium
tcaggcatagagtatcgcctgtacgcgccagttatccgactgttgttcttcatacatttgaataattctgtaccaggacgcaccctgttcatcggctttcagggcgataatccgctctacatcctgtgggtttcctgcaacattactgaccgagatcaggccgatttcattcagacccgttacgcagtcagcactggcgaattcggcagactgtgccgtcgtactcaccagtccggcagaaagcagcagtgaggataaggcaagttcttgtttcatcgtcagctccttattacataccccgcatttaacaggacgctccat

SEQ ID NO: 124 - DNA, 618 bp, Salmonella typhimurium
atgactatgacaagactgaagatttctaaaactctgctggccgtaatgttgacctctgctgttgcgacaggttctgcctttgcagaaaacgcaacaacggacaaggcgcaaagcggaaccgaaaccgcagggcaaaaagtcgatagctctatgaataaagtcggtaacttcatggatgacagcgccatcactgcgaaagtaaaagctgcgctggtagaccatgacaatattaaaagcaccgatatttctgtcgaaaccaatcagaaagttgtcaccctgagcggctttgtagaaagccaggcgcaggctgaagccgccgtgaaagtggcgaaaggcgtagaaggcgtgacctccgttagcgacaaacttcacgttcgcgacaataaagaaggttccgtgaaaggttatgccggcgatacggccacgaccagtgaagtcaaagccaagttgctggcggacgatctcgtcccttcccgtaaagtgaaagtggaaacgaccgatggcgtcgtacagctctccggtaccgttgaaactcaggaacaaagcgaccgcgctgaaagcatcgcgaaagccgttgatggcgtaaaaagtgttaaaaacgatctgaaagttcagtaa

SEQ ID NO: 125 - DNA, 456 bp, Salmonella typhimurium
ttaacccgccatctgtttttcgcgaatttcagccagcgttttgcagtcgatgcacagatcggctgttggacgcgcttccaggcggcggataccaatctccaccccgcaggactcgcaataaccgaagtcttcatcttccactttcttcagcgtcttctcgatctttttgatcagtttgcgctcacggtcacgattacgtaactccaggctaaactcctcttcctgcgcggcgcgatcgaccggatcggggaagttggcggcttcgtcctgcatgtgcgtcacagtgcgatcgacttcatcccggagttgattacgccatgcttcaagaatacgcttgaagtgcgatagctgggcttcgttcatatactcttcgcccggtttctcctggtacggctccaccccagcgatggcgagaatactcagggacgatgttttacggttttgcccttcttgcat

SEQ ID NO: 126 - DNA, 888 bp, Salmonella typhimurium
atgtctttacattcgccggggcaggcatttcgcgccgcgctcgctaaagagaatccattacaaattgtcggcgctatcaatgccaaccatgctctgttggcccaacgggccgggtatcaggctatctatctttctggcggcggcgtagcggcgggctcgctcggactgccggatctggggatttctacgctggatgatgtgttaaccgatatccggcgcatcacggatgtttgcccgctgccgctgttggtggatgcggatattggctttggctcctccgcctttaatgtcgcgcggacggtaaagtccatagccaaagcgggcgccgccgcgctgcatattgaagaccaggttggcgctaagcgctgtggacaccgtccaaacaaagcgatcgtctcgaaagaggagatggtagaccgaattcgggcggcagtggatgcgcgcaccgatccgaactttgtgatcatggcgcgtaccgatgcgctggcggtggaagggctggaggcggctctcgatcgtgcgcaggcttacgtggacgcgggggctgacatgctgttcccggaggcgatcaccgaactgtcgatgtaccgccggttcgccgacgtggcgcaggtgccaatcctcgccaacatcactgagtttggcgcgacgccgctgtttacgaccgacgagttgcgcagcgcacacgtggcgatggcgctctatccgctgtcggcgtttcgcgccatgaaccgcgccgcagaaaaagtctataccgtgctgcgccaggaagggacgcaaaagaacgtgatcgacatcatgcagacccgcaacgagctgtacgaaagcatcaattactaccagttcgaagagaagctggacgcgctgtacaggaataaaaaatcgtag

SEQ ID NO: 127 - DNA, 1170 bp, Salmonella typhimurium
atgacagacacgacgatcctgcaaaacaacacgcatgtcattaagcctaaaaaatcggtcgcgctttccggcgtacctgccggaaataccgctctgtgtaccgtgggaaaaagcggtaacgatctgcactatcgcggttacgacattctcgatctggcggagcactgcgaatttgaagaagtcgcgcatttactgatccacggaaaattaccgacccgcgacgagctgaacgcgtataaaagcaagttaaaagcgctgcgcggattacccgccaatgtccgtaccgttctggaagcgttaccggcggcctcgcacccgatggacgtgatgcgtaccggcgtctccgcgctgggctgcaccctgccggaaaaagagggacataccgtctccggcgcgcgcgatattgccgataagctgttggcctcgctcagctctatccttctttactggtatcactacagccacaacggcgaacgtattcagccggaaaccgacgatgattccatcggcggccatttcctgcatctgctgcacggtgaaaagccaacccaaagctgggaaaaggcgatgcatatttcgctggtgctgtatgccgagcatgagttcaacgcctcgacgtttaccagccgggtgattgccgggactggctcggatgtctactccgcgattatcggcgcgattggcgcgctgcgcggcccgaaacacggcggggcgaatgaggtgtcgctggaaattcaacagcgttatgaaacgccggacgaggcagaggcggatatccgtaaacgcgtggaaaacaaagaggtggtgattggctttggacatccggtttacaccatcgccgacccgcgccatcaggtgatcaaacgggtggcgaaacagctttcagaagaaggcggctcgctgaagatgtaccacatcgccgaccgtctggaaacggtgatgtgggagaccaaaaagatgttcccgaatctcgactggttttcggcggtctcctacaacatgatgggcgtccctaccgaaatgttcaccccgctgtttgtcatcgcccgcgttaccggctgggcggcgcacattattgaacagcgtcaggacaacaaaattattcgcccctctgccaactataccgggccggaagatcgtccgtttgtctcgatagacgatcgttgctaa

SEQ ID NO: 128 - DNA, 471 bp, Salmonella typhimurium
atgaacattattaaagctaacgttgcagcccctgacgctcgtgtcgccatcactattgcgcgtttcaatcagtttatcaacgacagcctgctggatggcgcggttgatgccctgacgcgtattggtcaggtaaaagatgataatattaccgtagtgtgggtgcctggcgcctatgaactgccgctggcgaccgaagcgctggcgaaaagcggtaaatacgacgccgtggttgcgctgggaaccgtgattcgcggggggactgcgcactttgaatatgtggcaggcggcgccagcaatggcctggcaagcgttgcccaggacagcggcgtgccggtagcctttggtgttctgaccaccgagagtattgaacaagccatcgaacgtgctggtacaaaagccggtaataaaggcgcagaagctgcgctgaccgcgcttgaaatgattaatgtattgaaagccattaaggcctga

SEQ ID NO: 129 - DNA, 495 bp, Salmonella typhimurium
ttactcgctgacggtcacgttttcaatgatgacgtcttcttttggtacgtcctggtgcataccgctacggccagtggcgacgcctttgattttatctaccacgtccataccttctacgacttccgcaaagacgcagtagccccagccctgcagactttcgccggagaagttcaggaagtcgttgtctgccacgttgatgaagaattgcgcggtagccgagtgtggtgcctgagtacgcgccatcgccagcgtaccacgggtatttttcagaccattgttggcttcgtttttgatcgcctctttggtggctttctgtttcatgcccggctcaaagccgccgccctgaatcataaaaccgttaatcacacggtggaaaatggtgttgttgtaaaaaccttcgcggcagtagtccaggaagtttttaactgtttcaggcgctttatcatcaaaggttttgattacgatatcgccgtgattagtgtggaaagtaaccat

SEQ ID NO: 130 - DNA, 927 bp, Salmonella typhimurium
ttagttaagcgctttatcattcggtgctttgaacagggctttcatctcgtcagacaactcgaaattcatgttcaggtttttcggtgggatcggatttttaaaccacttatcaaaccacttttccgcttcgccggaggtttgcgcctgggcgatggtatcgtccatcagctttttaaactcagggtcgtttttacgcagcatacagccgtaggcttcctgggactgcggtttaccgacaatctcccagttatccggtttcttggctttggcgcgctcgccggccagcagcgcgtcatccatcataaaggcgacggcgcgaccgctttccagggtgcggaacgagtcaccgtggtctttcgcgctaataatacgcatccccatcttttgctcttcgttaagcttatgcagcagaatttcagaggtcgtcccggaggtgacgacgaccgctttgcctttcagatccgggaaatctttaatatcgccgccttttttagtcagcagtcgcgtcccgacgacgaaaatcgtatcggagaaggcggcctgtttctggcgctcaaggttgttagtcgttgaaccacattcaaaatcgaaggttccgttttgcaatagtggaatacggttttgcgaggtgatcgggatcagcttcacctgcagatcgggcttgttaagtttcttttttaccgcttccacaatggcgttggagtagtcctgggaatagccgaccactttctgctggttgtcgtaataagaaaagggcacagaagattcgcgatgcccgacgacgatcacgccatttttagcgatcttgtccagggtgctaccagcggcaggcgcgccatcttctgcgtgcgcaaggcccgcagacagtcccatgaccagcattgctgtggttagcttacgtaattgcatatccaactcctttatcat

SEQ ID NO: 131 - DNA, 387 bp, Salmonella typhimurium
ttactgtgtggtaccgtcggttttggtattcacgtcattattgacgccattaccggtttccacttttttattaatatccgggcagcgaccgtctttacacatggtatttttatgctcttcatccttggtcattccgtcatgattcatggttgaaccgtctggatgctgcatcgtgctgttagtattgccgttggtattgatgtcgttgttattcacatcattcggcgctacattctggcgggcgtccggggcaacctgaccggcatttgccgccgagttcgcctggccattactggattgcgcgttagattcagcagctaacgctgcgccgctggcaaggccgagggtagcggtcagtaaaagcgtagtcagttttgtcattttcat

SEQ ID NO: 132 - DNA, 513 bp, Salmonella typhimurium
atgagtcaggtcagcgctgaatttatcccgacccgcatcgctattcttactgtttccagccgacgcggcgaagaagacgacacctccggtcattatctgcgtgattcggcgcaggaggccgggcatgaagtggtggcgaaagccatcgttaaagagaaccgttacgcgattcgcgcccaggtttccgcctggatcgccagtgatgaggtgcaggtcgtattgataactggtgggaccggtttgaccgaaggcgatcaggcgccggaagcgctgttgccgctgttcgatcgtgaagtggaaggatttggcgaagtgtttcgcatgctctcgtttgaagagatcggcaccgcaactctgcagtcgcgcgcggtagctggcgtggcgaataacaccttgattttcgccatgccgggctccacaaaagcgtgcagaaccgcatgggagaatatcattgcgccgcagctggatgcccgtacacgcccatgtaattttcaccctcatttaaagaaataa

SEQ ID NO: 133 - DNA, 864 bp, Salmonella typhimurium
atgggaagtggatggcatgaatggccgttgatgatcttcacggtctttggtcagtgcgtggccggtggttttattgttctggctctggcgctgatgaagggcgacctgcgcgcggaaacgcagcagcgggtgatcgcctgtatgtttggtctgtgggtgctgatggggattggctttatcgcctcgatgctgcatctgggctcgccgatgcgcgcgtttaactcgcttaaccgcgtgggtgcttccgcactgagcaatgaaattgccagcggctcggtgttttttgcggtcggcgggatcggctggctgctggcggtactgaaaaagctgccgccggcactgcgcacactctggctgattatcacgatggtactgggcgtcgtcttcgtctggatgatggtacgcgtctataacagcatcgatacagtaccgacctggtatagcgtctggacgccgctgggcttcttcctgacgctctttatgggtggcccgctactgggttatctgctgctgcgcatcgcgggcgtgaacggttgggcgatgcgtttgttgcctgcggtttcggtgctggcgctggtggttattgccattatggtggccatgcagggcgcggaactggcgacgattcacagttccattcagcaggcgtctgctctggtgccggattatggttcgctgatggcctggcgtatggtgctgcttgcggcggcgttgtgctgctggattgtgccacagttaaaagggtatcaacctgcggtaccgttgctctctgtcgccttcattctgatgctggcgggggaattgattggccgcggcgtattctatgggctgcatatgaccgtgggcatggcggtagccagttaa

SEQ ID NO: 134 - DNA, 237 bp, Salmonella typhimurium
atgagcactatcgaagaacgcgttaagaaaattatcggcgaacagctgggcgttaagcaggaagaagtaaccaacaatgcttctttcgttgaagacctgggcgcagattctcttgacaccgttgagctggtaatggctctggaagaagagtttgatactgagattccggacgaagaagctgagaaaatcaccaccgttcaggctgccattgattacatcaacggccaccaggcgtaa

SEQ ID NO: 135 - DNA, 444 bp, Salmonella typhimurium
gtgagcacgtttaaagtgagatgtgagcaaatggctaaccaaccttcagcagaagaactcaagaaaaaattgtccgaaatgcaattctacgtgacgcaggatcgtggcacagaaccgccatttaccggacgcctgctacataataaacgcgatggggtttatcactgcctggtctgtgatacgccgctttttcactcccacaccaaatacgattcaggctgcggctggcctagcttttaccagcctgtcagcgaagaggcgattcgttacatagacgatttttctcatggaatgcagcgtgtcgaaattcgttgcggtaactgcgatgcgcatctcggacacgttttcccggacgggccgcagccaaccggtgagcgctattgcgttaactcggcctcgctggccttttctgacgagaaaaacggcgatcaactgaaaggctga

SEQ ID NO: 136 - DNA, 885 bp, Salmonella typhimurium
ttactcatgatgatcctcctcatcgtcgtccgtttctttattcgggccaataccgatgtagtggtaaatcagaccggcgaaagtggcgataaagcccgctgcggccagcggttttagcgcccctttccacagattgattgaggtatcgatctgcggatctttcggcaagccgtggtacaactccggctgattggcatggtgcagcacatacatgacgtgcgtaccgccgacgccctgcgggttgtagataccggcatgttcaaagccgcgcgcttttaacttctccacgcgttgctcacccagttccagcatctcttttttggtgccgaagtgaatagccccggtcggacaagttttgacgcaggccggttcctggcccacgctgacgcgatcgacgcagagcgtacatttataaacgcggttgtcctctttgttgaggcgcggaatattaaacggacacccggcgatacagtaaccacagccgatacagtgttcagattgaaaatcaacaatcccgttcgcgtactggatgatagccccggcagatggacaggctttaagacagcctggatcttcacagtgcatacaaccatctttacgaatcagccactccagcttgccgttctgctcggtttcggtaaagcgcatcaccgtccaggacttggcgctgagatcggcagggttatcgtacaccccgacacaatgaccaacgttatcgcgaatatcgttccattcagaacaggctacctggcaggctttacagccgacacaggaggagacgtcgatcagtttcgcgacttcggctttgtaatcacgcgcctgcggaggcggcgtgatggcgtttgttgcggaccgtttaataatgtcctgcgtttccatagacat

SEQ ID NO: 137 - DNA, 609 bp, Salmonella typhimurium
atggatctactcaggacaaaaaacgtggcaattaaattgattgttggtctggcgaatcccggtgcggaatatgccgcgacgcgacacaatgcaggcgcatggtacgtcgatttactggcggagcgcctgcgcgcgccgttgcgtgaagagcctaaattctttggctatacctcacgcatcacgctggaaggggaagatgttcgcctgctggtacccaccacgttcatgaacctcagtggtaaagcagttggcgcaatggccagtttttaccgtattcagccggacgaaattttggtcgctcacgacgagctggatctccctccgggcgtcgcgaaatttaaacttggcggcggccacggcggccacaatggtctgaaagacatcatcagcaagctgggcaataatcccaactttcaccgattacgcgttggaattggtcatccaggcgataaaaataaagttgttggtttcgtgctgggtaaaccccctgtttctgaacaaaaattaattgatgaggccattgacgaagcggcacgctgtacggaattgtggttcaaagagggtctggccaaagcaacaagccgtttgcatacctttaaggcgcaataa

SEQ ID NO: 138 - DNA, 1035 bp, Salmonella typhimurium
ttacttgttgaacgctgcctggaagacggcaaccagcgcgtcgttctggctttgcgtcagagtatgccccttaggatcgataaactgcaagctgctgcggttatctaaatcgccaacctgcaatttatagtctccggatgccaggcccgggtcgctagcgcccagatcccgccagtcgctgtcagacaacggtttgtacgttaccgccatgctgccctgagagcgagtgctgtcggtgactttcatgcccactttttccagcgcggccgggaggcgctgccacacgaggttgaacggaccgcgaacgaccagcataggtaaaccggtatcatcagcggcgctctgcacatccatcgttgcggcggaacggttctgcgcggcatttgccgcatccgtagcggtcttatccagaccggcggaaatgacgttcatcatttccgtgctatagcgctgcagcgacgccgcgtcagcgaccggcttgccagcctgttccagattaaccagttttaccgttaccgcctgctgatagccctgcggcttcaccgagatttgataacgtccacgatactgttcgtcttcatccaggcgattccagttcacccaatcggtcgtcagggtctggctggcatcgtcacgtttttcaatcggataatttttcgcctgaatcacgctgacgacttgcggccacagcgtgctgctccggccattttccaccaatagcgtagcggtatcgccagagaactgggtacgcgcgccgctcactaacgctaacggctgcgccggcggacggatatccaacgccttaccaaccgcgccgctccccttcgtgaccggaataacgtagtcgccggtcgttatcggcaggatcattcctgccggggcgtgaagttcagcaagcggcgcggcatccagataggattcatcgccgcttacctggcgcttgtagcgcgaatcggaactacaggcagcgagcagcaaaacaagcgaaacacccgcaaccttcgccaggcgcgacttttgtactgagtaagccat

SEQ ID NO: 139 - DNA, 387 bp, Salmonella typhimurium
ttatttcgcttcgcgtttgcttttgtaatccgcaatagcggctttaatcgcgtcttccgccagaatagagcagtgaattttcaccggcggcagttccagttcgtctgcaatgtcggtgtttttaatcgcctgcgcttcgtccagggatttccctttcacccactccgttaccagagaactggaggcgatagcggaaccgcagccgtaagtcttgaagcgcgcgtcttcaatgataccttcatcgttaactttaatctgcaacttcatgacgtcgccgcaggccggcgcgccaaccatgccgcttcccacgttatcgtcgttgttgtcaaacgaccctacgttacgcgggttctcatagtgatcgattactttttcgctgtaagccat

SEQ ID NO: 140 - DNA, 819 bp, Salmonella typhimurium
atgtcacattgttcctgtcatgataaaccgcagcacagtttgctgcctgcggcgtaccgcatcctcagtattactcgccacacgccgctggagtggaatttccgcgtggccgtcgattttcccgcgcactgggggcaatttgttgaggtgtcgctgccgcgcgtcggcgaagcgcccatctccgtttccgactacggcgacggctggatagatctgctgattcgtaatgtcggaaaagtgaccagcgccctctttacgctgaaagaaggcgacaacgtgtggctacgcggctgctatggcaatggctatccggtcgatacgctgcgccataagcccttactggttgtcgcaggcggtacgggcgtcgcgccggtgaaaggcttaatgcgctatttcgttgagaatccccaggaaattggtcaactggatatgattctcggctataaaaatcgcgattgcgtgctgtacaaagaagaaatggcgacgtggcgcggcaaacataatctggtactcacgctggatgaaggcgaggctgatgaccgttaccagattggccgggtgaccgatcggcttgccgacatgacgcttagcgatatcgacactatgcaggccatcgtcgttgggccgccaataatgattacctttaccgtaaaaatgctgctgcaaaaagggctcaagccggagcaaatctgggtggactacgaacgccggatggcctgctccgtcgggaagtgcggccactgccgtatgggcgaagtgtatgtctgcaccgacggtccgatatttaactacgccgtcgcgcaacgttttgccgattaa

SEQ ID NO: 141 - DNA, 384 bp, Salmonella typhimurium
ttacaggctttcggtaaaggtacgagcgataacgtcgcgctgctgttccggcgtcagggagttaaaacgcaccgcataaccagaaacacgaatagtcagttgcgggtatttttccggatgcttaaccgcatcttccagagtttcacgacgcagaacgttaacgttcagatgctgaccgccttcaacgcgtacttccggtttaacttccatcggaatttcacggtattcaatctcgcccagtttgctgacagccacaacttcatcttcagcaaagccggattttgcaacgatgcagcgcgcttcgcctttttcgctgtccagcagccagaaggaattcagcaggtcgtcgttagcggctttagtaatctggatacctgtaatcat

SEQ ID NO: 142 - DNA, 1284 bp, Salmonella typhimurium
atggaactcagaagaatatctgtaaataatttgttcggaattttaaactatgatattgatttagggaactcagaaacaattattattaccggaccaaatggttacggaaaaaccatgcttttaaagataattgacaacattttaaataaaaatatagattttttctttgatttgcgatttgaagaaataaaatttgaacttgacaccatattactatgtatagagaaacaaaaaaataagaatgttgcagttacggtagtcgattatgtaaacgataaaaaacgacaggaagtattcactctaaataaaaacaaagaacttgacgtcgattattttgatgaaatatataataaactattaatctgtgacaacatagattctgatcctatactaaaatcttacaatcatgaggaaatattaaattactataaaattaaaaaaataaaacttcataaagaaaagcatcataaaagtgatttcttggataaatccattcctaatgcagagttaacttttatcaaagcgcaaaggatagagaatataaaaaatgaaaaatcagcaatcgagtcacaagcaaatttccttcttgagttgataaaaagagctgctgaggaatcagcacaaataagccaaagacttgactccacatttccagcaagattatttgatagcattaacgaaaatatatcttcaacttctatcaatgacagattgataggcattcagagaaaaagagaactttttatgaagttcgggataataaagtctgaagatacttttatccctagaaaattcagcaatgcaacattaggaaaagagtactcaaccgttttaaatctgtatatttcagatgctttagaaaaactatcaccttatgaagaattatttgaaaaaataaatttatttgttaatttattgaacgaaaaaatgcttgcatttaaagaaatcaagatcagtaacgagcatggattttattttcaaagtgataatggagaaagaatatcattaagtaacttatcttcaggtgagcaaaaccaaatagtcatctattttgatcttatattcaaagctaaacaaaattcagtaattcttattgatgaaccagaaatctctttacatgttgcttggcaaaaagaatttcttgattcaatagcaagaatacaaaaacttaatgagttctctaaaataattattgctacacactcgcctcaaatagttaataataattgggatataacttacgatttattcgagaataacaataaaaacatggagggacaatga

SEQ ID NO: 143 - DNA, 1983 bp, Salmonella typhimurium
tcatagttttttgttcctttcatattctatttcaatcaagcctttaatgtattccccgtcagcatcatcatcttccgcaattatcctttcgactcgatcagttatttttgctattagtcgaggtgtagacttcttgtctgcgcaataacttttaaccatctgagaaattgaaaccgactcatctagaacaataaaatctttttgactttgtatttcttcatctgaaggaagccttacatccatgtagttgttttcattgagaaagttcagaccttcgagaattgtagggattgccggattttcattatcattatttaaaactaagtgactttctaaaaatgacctcgccatcatagtgtagagtgcatttcgaaaattagctctcttcaccagtttcatggcaaaacaaataacaaatggaaattcaagaccttttgcattatttatattagaaataaaaagtttaccatcttgctttgattttgtttcatgtgagatatttgaatcccacccaagctgttgttttacttttgattttagcgaatgaatgtactcataaatataaccaccggcgtcaagaaaaataacagcaatatctccttgctctaaagatggattgcgttccttaatatcgattataatatcaactattttatctggcccattatctgttccttctaacaaatgaacagcagtacttttatgatttttgggaatatcttcaaaacgcctcaaagggtctcttgataaatggactctatctcctacttttttatatttatacccacaagaatcccattcaggctcttttaaccaacgcagaacaggttcctcgtagagtcccattcctaaggcatgagaaaacatcaaattcttaggatctgtgcggtagcattttttaagaacgatatctgctcgattcacgttatcgctaatcggcatgaaaatattttggaaaacgtcacctgctacatataattttttagaagtaaccatttcacagagatcaatgaagctttgtgggaagtcttgactttcgtcgataaatacgtaatcaagtgcctttttatcagctctcccactattatttatatctgcaatggctttcttacatagggcatcaaaatcgccattaccaaatcccccaaatggaatttcgtaataatggcatatatatctgtacattccagaaaaaggttctttagtcaaaccccaagagttgaagcaaaaaagttttgtaccccattctatctgtttttcgactcgcataaaatcgaaaaactcagggattctggttctcattgtggaagcgagaattttattaaagcaagtaaatgcaattctagaatcagggttttttgaataaatctcttttaatttgtgtaaaagtaattcagttttacctgaaccagctaatccttgtattacactcttttttccaaagccactctggaagacaaactttgtttgatccgtatcaaataaaataattttggattttattgtatctaataaattatttgcttcaaggttaattcttgatgtgtcgttaatactaccaacaataagtgagataattaaatcaatcaccctactttctttagtttcgacttccagttttttgaaatcgatatcattacgagaaagcgattcaaataaaatttgccacgattttttcctgccgatcttatctcgatacttgaatttctccgctaaataagaaacatcttcgagaaaatcttcctgatactcctcaaaaagatcatcgtcatccccaaaatctataaaaaaaggttttataccagaagaaaatactgcaatcgctcggtcataatcatactttacatcctcattagatagaggtctgcaaagaatatatgtttgttttttatgctgctcagcatagctgtttattattacatcaacaccagcactttgagccagagctaatgcatcctgagagtaaaagcagtagttggacat

SEQ ID NO: 144 - DNA, 546 bp, Salmonella typhimurium
atgactgaggaacatgtcgttttattggatgagcaggataagccttccggcacactggaaaagtatgcggctcatacgcttaatacgcctttgcatctggctttctcctgctggctatttaacgaagatggtcagttgctggtaacacgacggtcgctgagcaagaaagcctggccaggcgtgtggacgaattcggtttgcggtcatccgcaacaaggcgaaaccaccgaagaggcgatcatccgccgttgtcggttcgaactcggcgtggaaattaccgatctcacccccgtctatccgcacttcagctatcgagcgacagatccaaacggtattgtggaaaatgaagtctgtccggtatttgccgcgcgggcaaccagtgtgttacaggttaacagcgaagaggtgatggactatcagtggagcgaatttaaaagcgtatggaaaagccttctcgctacgccgtgggcatttagcccgtggatggtcatgcaagcgtcagacgaacaagcgcgtgaacgactgctcaattactgccagcgttaa

SEQ ID NO: 145 - DNA, 390 bp, Salmonella typhimurium
ttattcgtcttctaacaatgcctcatacgcggtggcatccagcagcgattcaagttcgctttcatcgctggctttgattttaaagatccagccaccggtatacggttcgctgttcaccagctccggggagtcgctcagcgcatcgtttaccgccacgatctcgccgcttaccggcgcataaatgtcggacgccgcttttacggactccgccacggcgcagtcgtcgcccgcgcttacggtcgcgccgacttccggcagatcaacaaaaaccatatcgcccaacagctcctgagcgtgttcagtaatgccaacggtgtaagtgccatccgcttctttacgcagccattcgtgttctttgctgtatttcagttctgcgggtacgttgctcat

SEQ ID NO: 146 - DNA, 2295 bp, Salmonella typhimurium
ttacatcgcctgagtaaaggtgcgcgaaataacgtcctgttgctgttcacgcgtcagcgcattgaagcgcacggcatagccggaaacgcggatcgtcaggttcgggtagttttccggatgttcaatcgcatccagcaacatttcacggttcatgacattgacgttcagatgctgcccgccttctacctgtgcttcatgatggaaatagccgtccagcaggccgacaagattggttttccgcaccgcatcttctttcccgagcgccgcaggcacaatcgagaaggtgtacgaaataccgtctttggcgtaggtaaacggcagtttcgccaccgacgtcagcgaggccaccgcccctttgcggtcacgaccatgcatcgggttcgcccccggcgcgaacggcgttccggcgcggcgtccatccggcgtattgccggtcttctgcccgtacacgacgttcgaggtgatggtcaaaatggactgcgtcggcaccgcattgcgatacgtcggcaacacgctaattttttgcataaagcgtttcaccaggtcgcaggcgatgctgtccacgcgctcatcgttgttgccgtactgcggatactcgccttcaatagcaaagtcgatggcaaggccgttttcgtcgcggatcggcttcacctgagcgtacctgatggcggacagggaatccgccgccaccgacagtccggcgatgccgcacgccatcgtccgatacacatcacggtcgtgcagcgccatcagcgaagcttcatagctgtacttatcgtgcatgtagtgaatgatgttcagcgcgctaatgtactgcaccgccagccagtccataaaatggtcgagactctccattaccgcgtcataatccagcacctcatccgttaacggcgcggttttcggcccgacctggattttcagtttctcatcaacgccgccattgatagcgtacagcaacgttttggcaaggttggcgcgcgcgccgaagaactgcatctgcttaccgatgaccatcgggctgacgcaacaagcgatggcgtaatcgtcgctgttaaagtcggtacgcattaaatcgtcgttttcatactgcaaagatgaggtcacgatggagacctgcgcagcatatttcttgaatgccaccggcaacgcttctgaccacagtatggtcaggttcggctccggcgctggccccatcgtgtgcagggtatgcagataacggaaggagttcttcgtcaccagcgtgcggccatcaagccccatcccgccaataacttcggtggcccagatcggatcgccggaaaagagcgaatcaaattccggcgtgcgcaggaaacgcaccatgcggatcttcatgatgaaatggtcgatcagttcctgcgcctgctgctctgtcagaaggcccgcgttgaaatcgcgctcaatgtagatatcaaggaacgaggcggttcttcccagcgacattgcaccgccattttgcgattttaccgccgccagataagcgaagtagagccactgtaccgcttcctgcgcgttccgcgccgggcgggagatatcgtagccgtatttcgccgccatctcctgcatttgcagcagcgcgcgacgatgctccgccaactcctcacgcaggcgaatcgtcgcctcaagattctgtccctgctccagattcgactgcaggtcggcgaattgcagctcgcgttcgcgcaccagataacggatgccatacagcgcgacgcggcgataatcgccaataatgcgcccgcgaccataaccatccggcaaaccggttaatacgccggatttacggcagcgcagcatatccggcgagtaaacatcgaatacgccctgattatgggttttccgcaggtcggtaaaggtatattcaaaatcggcgtccatttcgcggccataagcgtggaatgaacttttgatcatgttaacgccgccaaacggatgcaaagcgcgtttaagcggcttatccgtttgtaaaccgacgattttttccagctctttttcaatataccccgcatcgtgcgcggtaatcgtcgtcgcgatgttggtatcgaaatccaccggcgcatgggtcgcgttctcgatacgtattcccgccatcaccttttcccacagcgccgtggtcgctggcgtcgcgtcggcgagaaaagattcatccccctcatagggcgtatagttatgctgaataaaatcacggacattaatttcttctttccagtccgtacctttaaaatcacgccatgcttcggcatacagcatatcgctggtatcgatatttaccttcat

SEQ ID NO: 147 - DNA, 477 bp, Salmonella typhimurium
ttaatcggtaaccttaatttgtgattgcagataattttgcataccaagtttggcaatcaaatccaactcagtttccagccagtcgatgtggccttcctcgtcggcaagaatttcaatcatcatatcccggctgacataatcatgaacgctatcggcataggctattgcctcacgtagatcttttgcgccttccagttcgagccggagatccgatcgtagcatctcttcgacatcttcaccgatgcccagcttgcccagatcctgtaggttcggtatgccttccagaaataaaatacgctcaatatacttatcagcgtgtttcatctcatcaatggattcatggtactcaacatcattaagccgggtcagcccccagtttttgaacatacgggcatgaagaaaatactgattaattgcgacaagctcatttcccaatagtttattgagataatttatgattttaacatcacctttcat

SEQ ID NO: 148 - DNA, 252 bp, Salmonella typhimurium
ttaacgcaacagcggatccagtccaccacgcgcatccagcgcatacaagtcgtcacaaccgccaatgtgctgtgcatcaataaaaatttgcggaaccgtcgttcggccactacgtttgatcatctcttcacgcttcacggcgtcgccgtcaatcgcaatttcctggaaactcacgcccttgctgtttaacagcgcctttgcacgatggcaaaacgggcaggttgctttggtgtagatttcaatattggccat

SEQ ID NO: 149 - DNA, 432 bp, Salmonella typhimurium
tcacttaccgcgcaccagaggcagattctcgccgctccagcctgctacgccttctttcaacacaaagaccttttcaaagccggcttttgtcagcgcgttagcggattcctggcactgcataccagaaccgtcgaccacgataatcggcttgtctttgtgcttttccagttcgccaacattgttggctttgatttcgctcggcagcaaattggtcgcgccagcgatatggcctttacggaaatcgtcacgttgacgtaaatccacaacaacggcgtcctctttgttgataaggcgcgtggcttcgccgcgtgtaatcaccttaacttttgaagtcagacctttgaacgtggtaaataaaaccgccaccagtaacgcaatccaggcgatactcagtatgggatgacggccaacaaattgcataatttcttgcat

SEQ ID NO: 150 - DNA, 240 bp, Salmonella typhimurium
ctacgcgacagcgaacatcacgtacagacccagacctacagcgatcatcgggatagcatccaccagacccataacgataaagaactgagtacgcagcagaggaatcagatcaggttgacgcgccgcgccttccaggaatttacccccgaggatgccgataccgatcgcagcaccgattgccgccagacccatcatcacagcggcagccatgtacagcagatccatattcaggttttccat

SEQ ID NO: 151 - DNA, 330 bp, Salmonella typhimurium
atgagcgataaaattattcacctgactgacgacagttttgacacggatgtactcaaagcggacggggctatcctcgttgatttctgggcagagtggtgcgggccgtgtaaaatgatcgctccgattctggatgaaatcgctgacgaatatcagggcaaattgaccgttgccaaactgaacattgaccagaacccaggtactgcgcctaaatatggcatccgcggtattccgactctgctgctgtttaaaaacggcgaagtggcggcaaccaaagtaggcgcactgtctaaaggtcagttgaaagagtttctcgacgccaatctggcgtaa

SEQ ID NO: 152 - DNA, 396 bp, Salmonella typhimurium
ttaccagaacagggcaacatacagaatgactacggtgactaccgcagtgaccacccaaagccctttgatgattggctctggccccattttttcgtcttttacaatgatattggccgccttcggcgccagttcaaaccaggttttggtgtgcagcagcgcggccgccagggtgatcaggtttaagatcaccaccaccgggttttgtaaaaagccgacgaatcccatccaggattccgcgccgtgtttgagcgcaaacagaccgaaaatcagttcaatactgaaccagactgccggcaccgctgtgccttcgcgcagcatataaaagcgataaaacggcagttttttccaccaggtggacgtcatcggccgcacatagggtttgcgtttagtcgtcat

SEQ ID NO: 153 - DNA, 531 bp, Salmonella typhimurium
ttatttcttcgctgcgcgctcgaaggaggcaacgatttccgctttagccgcttcggcgttgtcccaaccgtcaactttcacccatttgcctttttcgagatctttataatgctcgaagaaatgagtgatctgcgctttcagcagttccggcagatcgttcacatctttaatgtgatcgtactctttgctcagtttggtgtgcggtacggcaaccagtttcgcatcttcaccggattcgtcggtcattttcagtacgccaaccggacggcaacggatgacggcgcctggctgcagcgggtacggcgtcgggaccagaacgtctaccgggtcgccgtccagagacagggtatggttgatgtaaccgtagttgcacggatagaacatcgctgtggacatgaagcggtcaacgaacagcgcgccgctctctttgtcaacttcgtatttgatcggatctgcgttagccgggatctcgataacgacgtagatatcttccggcagttctttacccgccgggacgttgagtaagctcat

SEQ ID NO: 154 - DNA, 375 bp, Salmonella typhimurium
ttaacaagacaaactaacaggattggccctggtggcgttgacgaaacaacggaacaggcggttgcccgatttacgccatttttgcaaatcctgcgtattaataccatagctgctgaacaacataaaggtgtcgtccaggtattcatctatctgcgcaatcaatttattgtcttcattgtacttaattttataattaagcgcgaaagttgcaatatgctctatcagctcattgagctgcaggttgactgctgaggtcgggtcattaacccagccatggttgctttcttcaaggtttgcaagacagtcatgatacagggtttcgcaaagaaatttaagctgtgctatatcatgtcttttgggtgagtattcgtccat

SEQ ID NO: 155 - DNA, 228 bp, Salmonella typhimurium
gtgatatactgtgcacgtttacacataagcgaggatgatatgtctactgatttggacccaacccaactggcgattgaatttttacgccgtgataaaaccgaactttctcccgcgcagtatttgaagcgtttaaaacagctggagttagagtttgccgatctcctcaccctctcagcaaccgaactgaaagaagagatctatttcgcctggcggttgggcgtgcattaa

SEQ ID NO: 156 - DNA, 633 bp, Salmonella typhimurium
ttaataattgtccaaatagttatggtagcgagcttttatgtcggccgcccattgcgctttcgcctcctgcatgttgctggcccgagcgatataatattctaaacacggaatggcgcctaatgcctgaggtaaggcattatatgctgccattcgctctctgacggttttatatttttcatcaatatcataatcatagtacgctggcgcttcaaaaaagccctcttccagtctcatacaaatctcttcaaaggtcccctcaacctcaacggtatgttccccatccgatatcctgacgattggcttaccttcagctatcagcgagagttgttcgaatgttaacatccgaccatcagaaagctcgacatctatagtaaacagtccatcacgtacagcatcagcaaggtgattatggatattccctgcattggcacagaactccgcaactttaggcgtaacattacaataatgttcaattactcgcgtaaatccgtaggccagtcctgcggtaagcacatacaagatgcctttcatgatttttgttgataatttattttcataatctcctgcagcaacatgaggtagcttatttcctgataaagctctggcataggtagaaactgatgtatatggcat

SEQ ID NO: 157 - DNA, 285 bp, Salmonella typhimurium
ttaacgcaggccgagctggaagatcagcgtttctgcttcgcaggcgaaaacaaaatcaatatccagacgaacgccttcggattcctcggtaaaggttggcgtaatttggcaaggttcagactccacgctacgcgctttttcggttaacgccgccagcgtctcttcagcctctgcgcgggtagcgaatacgcggctgtatgacgcggtgcaatcggagttgtccatgatggttccaacgtccatacagcagcaaaccggggtttcatcagcactgcatttactcat

SEQ ID NO: 158 - DNA, 351 bp, Salmonella typhimurium
ttagtcggttttttcgtcgccaaaaagcccattcagataacgttctaacgctattcgggagctaaagccgtggggaataccgtaatgttcgtgggtctcgccgcctaaatagagcggaaagttttggtaatgatcgcaggttttaatatccgaagccgggtcagccagtgatgagctacggtcttttaatctggggtgaatgatcagcgcggtacgccccatacgcgcctcgcggttaacataaacataattctcgccgcgtcgataaccatacgtcttattcgtcaccacatcgacggtaaaccctgccttttccagtacccgcgccacctcgtcaggtcgtaaatacat

SEQ ID NO: 159 - DNA, 312 bp, Salmonella typhimurium
ttagcggcaaaggttgccgtgatttattttcgtcagcgcgtcgttcacgccaaataatgtaaacgtcacctcatcaacgccaagatttttcagacgcgcagtgtgttttttaatataagcctgcgccgtttcttcggattcaaacaagtaaataccgccagcttgctggtttttctcgctttctgtccagattttccagatgaagcccggctcctcattgatagactccgccagcccgaccagttgctgagtcatctcctcgccaaaagggccgctaaagttaaaatggatctgtaaaagtgtcttcgacat

SEQ ID NO: 160 - DNA, 255 bp, Salmonella typhimurium
aggaatacattaacgctggcggtactgccagacttgatgcgggtaccaatccggttcttcattcagatcagggctggcaataccgtcattgatggtaccagtatcagttacgagagtttggcatcatccaaagtatgtcccgcaaaggcaactgccttgataatgcctgtgcagaatgttttttcgggactttaaaatcagaaagtttttacaccagtaaatttaaggatattgatgaacttaagatagctattg

SEQ ID NO: 161 - DNA, 270 bp, Salmonella typhimurium
atgaaatgtaaacgcctgaatgaagtcattgaactcctccagccagcctggcagaaagagcctgatcttaatctgacgcaatttttgcagaaactggcgaaagagtcaggttttgacggcaaactggaagatttaactgatgatatcctgatctaccatctgaaaatgcgcgattccgccaaagacgccgccattccagggattcaaaaagactatgaagaggactttaaaacggcgcttttacgcgcccgcggcgttattaaagagtaa

SEQ ID NO: 162 - DNA, 225 bp, Salmonella typhimurium
gtgagtttaccccaaaagagtaaagtaatgcacatagcgaggacgctaacaggatcaacgactcaggatgagggtcaggagcgccaggaggcgaagacacaggattgtcaggaagacaaacgtccggagacgttagtaaaaggaaatggaaacaacatggaatgttccaggctaagggaaaaacagggcgtgttgatagccaacagggatggtggaacccgttaa

SEQ ID NO: 163 - DNA, 240 bp, Salmonella typhimurium
atgtctttagaagtgtttgagaaactggaagcaaaagtacagcaggcgattgacaccatcaccctgttacagatggaaattgaagagctgaaagaaaagaacaacagcctgacgcaggaagtgcagtctgcacagcatcagcgtgaagaactcgagcgtgaaaataattctctgaaggaacagcagagcggctggcaggaacgtttgcaggcgctgcttggtcgtatggaagaagtctaa

SEQ ID NO: 164 - DNA, 114 bp, Salmonella typhimurium
gtgacggttaaaaattctgaatataaaaccgaaggccgaattcctgcctacaattattatcacgtccagcagaaattgcagagcatttgggcgaataacacctgctattcctaa

SEQ ID NO: 165 - DNA, 213 bp, Salmonella typhimurium
atgatgaataaagacgaagccggcggtaactggaaacagtttaaaggtaaaatgaaagaacaatggggcaaactgaccgatgacgatatgaccgttatcgaaggtaaacgcgaccaactggtaggtaaaatccaggagcgttacggttaccagaaagatcaggcggaaaaagaggttgttgactgggaaacccgtaacaactatcgctggtaa

SEQ ID NO: 166 - DNA, 417 bp, Salmonella typhimurium
atgtggtatcagcgcaccattacactgagcgagaagccgcgcgggtttcatctgataacagatgaaattaccgataaattgtctggcttaccgcctgtcgaaacgggtttgctgcatctgttgttgctacatacctcggcctcgctgacgttaaacgaaaactgcgatcccaccgtgcgcgctgatatggagcgccatttcctgaaaaccgttcccgataatgcggcgtatgaacatgattacgaaggcgcggatgacatgccttcgcatattaagtcgtcagtattgggcgtctcgttgctgctgcctgtacgccaggggcgtttacagttaggaacatggcaaggtatctggttgggagagcaccgtattcacggcggtccacgtaaaatcatcgcgacactacaaggggaatga

SEQ ID NO: 167 - DNA, 726 bp, Salmonella typhimurium
ttagaggtttgcaacgttatgatatactttttgcacatcatcatcatcttcaagggcatcaacaagtccttcaaagatttctaaatcttctggtgaaagttcaacttctgattgagcaatcatttctaattctgttgttgaaaattcagaaattccagctgcttttagcgctgcgattcctttatgcaggtctgtagcttcagtataaataacgatgtttccttcttcttcggttacatcacgaacatcaacttcagcatcaagcaaaatttcaaaaatatggtcagggtctgttcctttaaatacaatcactccagtattgtcaaacatatagctgacagcacctgccgctccgatattcccgccttttttattaaaaattgtgcggatattagcaatcgtacggttaacattagacgtcaacgtttcagcgataaccattgaaccattgggtccaaagccttcataacgcccttgcacgaacgtttcatctccgccacctttggctttatcaatagctttatcaataacatgttttggaacctgtgcttgtttcgcacgttcaataacgaattttaaagctgagtttgattccgggtctggttcaccttgtttagcagcagcatagatttctacaccaaattttgcatatactttagacgttgcaccgtctttagctgttttcttagcaacaatatttgcccatttacgtcccactggaaacat

SEQ ID NO: 168 - protein, 478 aa, Salmonella typhimurium
MSNNIRIEEDLLGTREVPAEAYYGVHTLRAIENFYISNNKISDIPEFVRGMVMVKKAAALANKELQTIPKSVANAIIAACDEVLNNGKCMDQFPVDVYQGGAGTSVNMNTNEVLANIGLELMGHQKGEYQYLNPNDHVNKCQSTNDAYPTGFRVAVYASIVKLIDAINQLREGFERKAVEFQDILKMGRTQLQDAVPMTLGQEFRAFSILLKEEVKSIERTAELLLEVNLGATAIGTGLNTPKEYSPLAVKKLAEVTGFACVPAEDLIEATSDCGAYVMVHSALKRLAVKMSKICNDLRLLSSGPRAGLNEINLPELQAGSSIMPAKVNPVVPEVVNQVCFKVIGNDTTVTMAAEAGQLQLNVMEPVIGQAMFESIHILSNACYNLLEKCVNGITANKEVCEGYVYNSIGIVTYLNPFIGHHNGDIVGKICAETGKSVREVVLERGLLTEAELDDIFSVQNLMHPAYKAKRYTDESEQ

SEQ ID NO: 169 - protein, 394 aa, Salmonella typhimurium
VSKEKFERTKPHVNVGTIGHVDHGKTTLTAAITTVLAKTYGGAARAFDQIDNAPEEKARGITINTSHVEYDTPTRHYAHVDCPGHADYVKNMITGAAQMDGAILVVAATDGPMPQTREHILLGRQVGVPYIIVFLNKCDMVDDEELLELVEMEVRELLSQYDFPGDDTPIVRGSALKALEGDAEWEAKIIELAGFLDSYIPEPERAIDKPFLLPIEDVFSISGRGTVVTGRVERGIIKVGEEVEIVGIKETQKSTCTGVEMFRKLLDEGRAGENVGVLLRGIKREEIERGQVLAKPGTIKPHTKFESEVYILSKDEGGRHTPFFKGYRPQFYFRTTDVTGTIELPEGVEMVMPGDNIKMVVTLIHPIAMDDGLRFAIREGGRTVGAGVVAKVLG

SEQ ID NO: 170 - protein, 704 aa, Salmonella typhimurium
MARTTPIARYRNIGISAHIDAGKTTTTERILFYTGVNHKIGEVHDGAATMDWMEQEQERGITITSAATTAFWSGMAKQYEPHRINIIDTPGHVDFTIEVERSMRVLDGAVMVYCAVGGVQPQSETVWRQANKYKVPRIAFVNKMDRMGANFLKVVGQIKTRLGANPVPLQLAIGAEEGFTGVVDLVKMKAINWNDADQGVTFEYEDIPADMQDLANEWHQNLIESAAEASEELMEKYLGGEELTEEEIKQALRQRVLNNEIILVTCGSAFKNKGVQAMLDAVIDYLPSPVDVPAINGILDDGKDTPAERHASDDEPFSALAFKIATDPFVGNLTFFRVYSGVVNSGDTVLNSVKTARERFGRIVQMHANKREEIKEVRAGDIAAAIGLKDVTTGDTLCDPENPIILERMEFPEPVISIAVEPKTKADQEKMGLALGRLAKEDPSFRVWTDEESNQTIIAGMGELHLDIIVDRMKREFNVEANVGKPQVAYREAIRAKVTDIEGKHAKQSGGRGQYGHVVIDMYPLEPGSNPKGYEFINDIKGGVIPGEYIPAVDKGIQEQLKSGPLAGYPVVDLGVRLHFGSYHDVDSSELAFKLAASIAFKEGFKKAKPVLLEPIMKVEVETPEENTGDVIGDLSRRRGMLKGQESEVTGVKIHAEVPLSEMFGYATQLRSLTKGRASYTMEFLKYDDAPNNVAQAVIEARGK

SEQ ID NO: 171 - protein, 350 aa, Salmonella typhimurium
MKKTAIAIAVALAGFATVAQAAPKDNTWYAGAKLGWSQYHDTGFIHNDGPTHENQLGAGAFGGYQVNPYVGFEMGYDWLGRMPYKGDNINGAYKAQGVQLTAKLGYPITDDLDVYTRLGGMVWRADTKSNVPGGPSTKDHDTGVSPVFAGGIEYAITPEIATRLEYQWTNNIGDANTIGTRPDNGLLSVGVSYRFGQQEAAPVVAPAPAPAPEVQTKHFTLKSDVLFNFNKSTLKPEGQQALDQLYSQLSNLDPKDGSVVVLGFTDRIGSDAYNQGLSEKRAQSVVDYLISKGIPSDKISARGMGESNPVTGNTCDNVKPRAALIDCLAPDRRVEIEVKGVKDVVTQPQA

SEQ ID NO: 172 - protein, 548 aa, Salmonella typhimurium
MAAKDVKFGNDARVKMLRGVNVLADAVKVTLGPKGRNVVLDKSFGAPTITKDGVSVAREIELEDKFENMGAQMVKEVASKANDAAGDGTTTATVLAQSIITEGLKAVAAGMNPMDLKRGIDKAVAAAVEELKALSVPCSDSKAIAQVGTISANSDETVGKLIAEAMDKVGKEGVITVEDGTGLQDELDVVEGMQFDRGYLSPYFINKPETGAVELESPFILLADKKISNIREMLPVLEAVAKAGKPLLIIAEDVEGEALATLVVNTMRGIVKVAAVKAPGFGDRRKAMLQDIATLTGGTVISEEIGMELEKATLEDLGQAKRVVINKDTTTIIDGVGEEAAIQGRVAQIRQQIEEATSDYDREKLQERVAKLAGGVAVIKVGAATEVEMKEKKARVEDALHATRAAVEEGVVAGGGVALIRVASKIADLKGQNEDQNVGIKVALRAMEAPLRQIVLNCGEEPSVVANTVKGGDGNYGYNAATEEYGNMIDMGILDPTKVTRSALQYAASVAGLMITTECMVTDLPKSDAPDLGAAGGMGGMGGMGGMM

SEQ ID NO: 173 - protein, 557 aa, Salmonella typhimurium
MTESFAQLFEESLKEIETRPGSIVRGVVVAIDKDVVLVDAGLKSESAIPAEQFKNAQGELEIQVGDEVDVALDAVEDGFGETLLSREKAKRHEAWITLEKAYEDAETVTGVINGKVKGGFTVELNGIRAFLPGSLVDVRPVRDTLHLEGKELEFKVIKLDQKRNNVVVSRRAVIESENSAERDQLLENLQEGMEVKGIVKNLTDYGAFVDLGGVDGLLHITDMAWKRVKHPSEIVNVGDEINVKVLKFDRERTRVSLGLKQLGEDPWVAIAKRYPEGTKLTGRVTNLTDYGCFVEIEEGVEGLVHVSEMDWTNKNIHPSKVVNVGDVVEVMVLDIDEERRRISLGLKQCKSNPWQQFAETHNKGDRVEGKIKSITDFGIFIGLDGGIDGLVHLSDISWNVAGEEAVREYKKGDEIAAVVLQVDAERERISLGVKQLAEDPFNNWVALNKKGAIVTGKVTAVDAKGATVELADGVEGYLRASEASRDRVEDATLVLSVGDDVEAKFTGVDRKNRAISLSVRAKDEADEKDAIATVNKQEDANFSNNAMAEAFKAAKGE

SEQ ID NO: 174 - protein, 348 aa, Salmonella typhimurium
MEFFRKTALAALVMGFSGAAFALPNITILATGGTIAGGGDSATKSNYTAGKVGVENLVDAVPQLKDIAVVKGEQVVNIGSQDMNDEVWLTLAKKINTECDSTDGFVITHGTDTMEETAYFLDLTVKCNKPVVLVGAMRPSTSMSADGPFNLYNAVVTAADKQSANRGVLVVMNDTVMDGRDVTKTNTTDVATFKAVNYGPLGYIHNGKIDYQRTPERKHTTSTPFDVSKLTALPKVGIVYNYANASDLPAKALVDAGYDGIVSAGVGNGNLYKTVFDTLATAAHNGTVVVRSSRVPTGATTQDAEVDDAKYGFVASGTLNPQKARVLLQLALTQTKDPKQIQTMFNQY

SEQ ID NO: 175 - protein, 538 aa, Salmonella typhimurium
MRVNNLTPQDLKAYGINDVQDIVYNPSYDTLYQEELNPGLEGYERGVLTNLGAVAVDTGIFTGRSPKDKYIVRDDTTRDTLWWSDKGKGKNDNKPLSQETWQHLKGLVTHQLSGKRLFIVDAFCGANADTRLSVRFITEVAWQAHFVKNMFIRPTDEELVGFKPDFIVMNGAKCTNPQWKEQGLNSENFVAFNLTERIQLIGGTWYGGEMKKGMFSVMNYLLPLKGIASMHCSANVGEKGDVAVFFGLSGTGKTTLSTDPKRRLIGDDEHGWDDDGVFNFEGGCYAKTIKLSKEAEPEIYHAIRRDALLENVTVREDGTVDFDDGSKTENTRVSYPIYHIDNIVKPVSKAGHATKVIFLTADFGVLPPVSRLTANQTQYHFLSGFTAKLAGTERGVTEPTPTFSACFGAAFLTLHPTQYAEVLVKRMQAAGAQAYLVNTGWNGTGKRISIKDTRAIIDAILNGSLDNAETFRLPLFDLAIPTELPGVDTHILDPRNTYASPEQWQEKATALAKLFIENFEKYTDTPAGEALVSAGPKL

SEQ ID NO: 176 - protein, 432 aa, Salmonella typhimurium
MSKIVKVIGREIIDSRGNPTVEAEVHLEGGFVGMAAAPSGASTGSREALELRDGDKSRFLGKGVTKAVGAVNGPIAQAILGKDAKDQAGIDKIMIDLDGTENKSNFGANAILAVSLANAKAAAAAKGMPLYEHIAELNGTPGKYSMPVPMMNIINGGEHADNNVDIQEFMIQPVGAKTVKEAIRMGSEVFHHLAKVLKGKGMNTAVGDEGGYAPNLGSNAEALAVIAEAVKAAGYELGKDITLAMDCAASEFYKDGKYVLAGEGNKAFTSEEFTHFLEELTKQYPIVSIEDGLDESDWDGFAYQTKVLGDKIQLVGDDLFVTNTKILKEGIEKGIANSILIKFNQIGSLTETLAAIKMAKDAGYTAVISHRSGETEDATIADLAVGTAAGQIKTGSMSRSDRVAKYNQLIRIEEALGEKAPYNGRKEIKGQA

SEQ ID NO: 177 - protein, 331 aa, Salmonella typhimurium
MTIKVGINGFGRIGRIVFRAAQKRSDIEIVAINDLLDAEYMAYMLKYDSTHGRFDGTVEVKDGHLIVNGKKIRVTAERDPANLKWDEVGVDVVAEATGIFLTDETARKHITAGAKKVVLTGPSKDNTPMFVKGANFDKYEGQDIVSNASCTTNCLAPLAKVINDNFGIIEGLMTTVHATTATQKTVDGPSHKDWRGGRGASQNIIPSSTGAAKAVGKVLPELNGKLTGMAFRVPTPNVSVVDLTVRLEKAATYEQIKAAVKAAAEGEMKGVLGYTEDDVVSTDFNGEVCTSVFDAKAGIALNDNFVKLVSWYDNETGYSNKVLDLIAHISK

SEQ ID NO: 178 - protein, 356 aa, Salmonella typhimurium
MKTTLKNLSVALMLAGMTIGSGAVAAEKVVIAHRGASGYLPEHTLPAKAMAYAQGADYLEQDLVMTKDDHLVVLHDHYLDRVTDVADRFPDRARKDGRYYAIDFTLDEIKSLKFTEGFDIENGKKVQTYPGRFPMGKSDFRIHTFEEEIEFVQGLNHSTGKNIGIYPEIKAPWFHHQEGKDIAAKTLEVLKKYGYTGKQDNVYLQCFDVAELKRIKNELEPKMGMDLNLVQLIAYTDWNETQQKQPDGRWVNYNYDWMFKPGAMKQVAEYADGIGPDYHMLVAEGSTKGNIKLTGMVQDAHQNKMVVHPYTVRADQLPDYATDVNQLYDILYNKAGVDGLFTDFPDKAVMFLQKND

SEQ ID NO: 179 - protein, 638 aa, Salmonella typhimurium
MGKIIGIDLGTTNSCVAIMDGTQARVLENAEGDRTTPSIIAYTQDGETLVGQPAKRQAVTNPQNTLFAIKRLIGRRFQDEEVQRDVSIMPYKIIGADNGDAWLDVKGQKMAPPQISAEVLKKMKKTAEDYLGEPVTEAVITVPAYFNDAQRQATKDAGRIAGLEVKRIINEPTAAALAYGLDKEVGNRTIAVYDLGGGTFDISIIEIDEVDGEKTFEVLATNGDTHLGGEDFDTRLINYLVDEFKKDQGIDLRNDPLAMQRLKEAAEKAKIELSSAQQTDVNLPYITADATGPKHMNIKVTRAKLESLVEDLVNRSIEPLKVALQDAGLSVSDINDVILVGGQTRMPMVQKKVAEFFGKEPRKDVNPDEAVAIGAAVQGGVLTGDVKDVLLLDVTPLSLGIETMGGVMTPLITKNTTIPTKHSQVFSTAEDNQSAVTIHVLQGERKRASDNKSLGQFNLDGINPAPRGMPQIEVTFDIDADGILHVSAKDKNSGKEQKITIKASSGLNEEEIQKMVRDAEANAESDRKFEELVQTRNQGDHLLHSTRKQVEEAGDKLPADDKTAIESALNALETALKGEDKAAIEAKMQELAQVSQKLMEIAQQQHAQQQAGSADASANNAKDDDVVDAEFEEVKDKK

SEQ ID NO: 180 - protein, 233 aa, Salmonella typhimurium
MGQKVHPNGIRLGIVKPWNSTWFANTKEFADNLDSDFKVRQYLTKELAKASVSRIVIERPAKSIRVTIHTARPGIVIGKKGEDVEKLRKVVADIAGVPAQINIAEVRKPELDAKLVADSITSQLERRVMFRRAMKRAVQNAMRLGAKGIKVEVSGRLGGAEIARTEWYREGRVPLHTLRADIDYNTSEAHTTYGVIGVKVWIFKGEILGGMAAVEQPEKPAAQPKKQQRKGRK

SEQ ID NO: 181 - protein, 760 aa, Salmonella typhimurium
MSELNEKLATAWEGFTKGDWQNEVNVRDFIQKNYTPYEGDESFLAGATDATTKLWDSVMEGVKQENRTHAPVDFDTSVASTITSHDAGYINKALEKIVGLQTEAPLKRAIIPFGGIKMVEGSCKAYNRELDPMIKKIFTEYRKTHNQGVFDVYTPDILRCRKSGVLTGLPDAYGRGRIIGDYRRVALYGIDYLMKDKFAQFTSLQSDLENGVNLEATIRLREEIAEQHRALGQIKEMAAKYGCDISGPATNAQEAIQWTYFGYLAAVKSQNGAAMSFGRVSTFLDAYIERDLKAGKITEQDAQEMIDHLVMKLRMVRFLRTPEYDELFSGDPIWATESIGGMGVDGRTLVTKNSFRFLNTLYTMGPSPEPNITVLWSEKLPLNFKKFAAKVSIDTSSLQYENDDLMRPDFNNDDYAIACCVSPMIVGKQMQFFGARANLAKTMLYAINGGVDEKLKMQVGPKSEPIKGDVLNFDEVMDRMDHFMDWLAKQYVTALNVIHYMHDKYSYEASLMALHDRDVIRTMACGIAGLSVAADSLSAIKYAKVKPIRDEDGLAIDFEIEGEYPQFGNNDARVDDMAVDLVERFMKKIQKLTTYRGAIPTQSVLTITSNVVYGKKTGNTPDGRRAGAPFGPGANPMHGRDQKGAVASLTSVAKLPFAYAKDGISYTFSIVPNALGKDDEVRKTNLAGLMDGYFHHEASIEGGQHLNVNVMNREMLLDAMEHPEKYPQLTIRVSGYAVRFNSLTKEQQQDVITRTFTQTM

SEQ ID NO: 182 - protein, 121 aa, Salmonella typhimurium
MSITKDQIIEAVSAMSVMDVVELISAMEEKFGVSAAAAVAVAAGPAEAAEEKTEFDVILKAAGANKVAVIKAVRGATGLGLKEAKDLVESAPAALKEGVSKDDAEALKKSLEEAGAEVEVK

SEQ ID NO: 183 - protein, 156 aa, Salmonella typhimurium
MPRRRVIGQRKILPDPKFGSELLAKFVNILMVDGKKSTAESIVYSALETLAQRSGKSELEAFEVALENVRPTVEVKSRRVGGSTYQVPVEVRPVRRNALAMRWIVEAARKRGDKSMALRLANELSDAADNKGTAVKKREDVHRMAEANKAFAHYRW

SEQ ID NO: 184 - protein, 90 aa, Salmonella typhimurium
MNKTQLIDVIADKAELSKTQAKAALESTLAAITESLKEGDAVQLVGFGTFKVNHRAERTGRNPQTGKEIKIAAANVPAFVSGKALKDAVK

SEQ ID NO: 185 - protein, 502 aa, Salmonella typhimurium
MTEKKYIVALDQGTTSSRAVVMDHDANIVSVSQREFEQIYPKPGWVEHDPMEIWASQSSTLVEVLAKADISSDQIAAIGITNQRETAIVWERETGKPIYNAIVWQCRRTADICEQLKRDGLEDYIRDNTGLVVDPYFSGTKVKWILDHVEGSRERAKRGELLFGTVDTWLIWKMTQGRVHVTDYTNASRTMLFNIHDLDWDDKMLDVLDIPRAMLPQVRKSSEVYGQTNIGGKGGTRIPIAGIAGDQQAALFGQLCVKEGMAKNTYGTGCFMLMNTGEKAVKSENGLLITIACGPSGEVNYALEGAVFMAGASIQWLRDEMKLISDAFDSEYFATKVKDTNGVYVVPAFTGLGAPYWDPYARGAIFGLTRGVNSNHIIRATLESIAYQTRDVLEAMQADSGIRLHALRVDGGAVANNFLMQFQSDILGTRVERPEVREVTALGAAYLAGLAVGYWQNLDELQEKAVIEREFRPGIETTERNYRYSGWKKAVKRAMAWEEHDK

SEQ ID NO: 186 - protein, 474 aa, Salmonella typhimurium
MSTEIKTQVVVLGAGPAGYSAAFRCADLGLETVIVERYNTLGGVCLNVGCIPSKALLHVAKVIEEAKALAEHGIVFGEPKTDIDKIRTWKEKVITQLTGGLAGMAKGRKVKVVNGLGKFTGANTLEVEGENGKTVINFDNAIIAAGSRPIQLPFIPHEDPRVWDSTDALELKEVPKRMLVMGGGIIGLEMGTVYHALGSEIDVVEMFDQVIPAADKDIVKVFTKRISKKFNLMLETKVTAVEAKEDGIYVSMEGKKAPAEAQRYDAVLVAIGRVPNGKNLDAGKAGVEVDDRGFIRVDKQLRTNVPHIFAIGDIVGQPMLAHKGVHEGHVAAEVIAGKKHYFDPKVIPSIAYTEPEVAWVGLTEKEAKEKGISYETATFPWAASGRAIASDCADGMTKLIFDKESHRVIGGAIVGTNGGELLGEIGLAIEMGCDAEDIALTIHAHPTLHESVGLAAEVFEGSITDLPNPKAKKK

SEQ ID NO: 187 - protein, 502 aa, Salmonella typhimurium
METKDLIVIGGGINGAGIAADAAGRGLSVLMLEAQDLACATSSASSKLIHGGLRYLEHYEFRLVSEALAEREVLLKMAPHIAFPMRFRLPHRPHLRPAWMIRIGLFMYDHLGKRTSLPGSTGVRFGADSVLKPEIVRGFEYSDCWVDDARLVLANAQMVVRKGGEVLTRTRATAARRENGLWIVEAEDIDTGKKYVWQARGLVNATGPWVKQFFDEGMHLPSPYGIRLIKGSHIVVPRVHNQKQAYILQNEDKRIVFVIPWMEEFSIIGTTDVEYKGDPKAVKIEESEINYLLKVYNAHFQKQLGRDDIVWTYSGVRPLCDDESDSPQAITRDYTLDIHDENGKAPLLSVFGGKLTTYRKLAEHAMEKLASYYPGIGPAWTKTCVLPGGDIDGSREDYAAKLRRRYPFLTESLARHYSRTYGSNTEWILGEATSLLDLGEDFGHEFYEAELKYLVDHEWVRRTEDAIWRRTKEGMWLTAEQQSRITQWLAAYVEKHQLSMAS

SEQ ID NO: 188 - protein, 432 aa, Salmonella typhimurium
MQVSVETTQGLGRRVTITIAADSIETAVKSELVNVAKKVRIDGFRKGKVPMNIVAQRYGASVRQDVLGDLMSRNFVDAIIKEKINPAGAPNYVPGEYKVGEDFTYSVEFEVYPEVELTGLESIEVEKPVVEVTDADVDVMLDTLRKQQATWKEKDGAADAEDRVTIDFTGSVDGEEFEGGKATDFVLAMGQGRMIPGFEDGVKGHKAGEEFTIDVTFPEEYHAENLKGKAAKFVINLKKVEERELPELTEEFIKRFGVEDGSVAGLRAEVRKNMERELKGAVRNRVKSQAIEGLVKANDIDVPSALIDSEIDVLRRQAAQRFGGNEKQALELPRELFEEQAKRRVVVGLLLGEVIRTNELKADEERVKGLIEEMASAYEDPKEVIEFYSKNKELMDNMRNVALEEQAVEAVLAKAKVSEKATSFNELMNQQA

SEQ ID NO: 189 - protein, 69 aa, Salmonella typhimurium
MAKIKGQVKWFNESKGFGFITPADGSKDVFVHFSAIQGNGFKTLAEGQNVEFEIQDGQKGPAAVNVTAI

SEQ ID NO: 190 - protein, 137 aa, Salmonella typhimurium
MSEALKILNNIRTLRAQARECTLETLEEMLEKLEVVVNERREEESAAAAEVEERTRKLQQYREMLIADGIDPNELLNSMAAAKSGTKAKRAARPAKYSYVDENGETKTWTGQGRTPAVIKKAMEEQGKQLEDFLIKE

SEQ ID NO: 191 - protein, 460 aa, Salmonella typhimurium
MATGKIVQVIGAVVDVEFPQDAVPRVYDALEVQNGNEKLVLEVQQQLGGGIVRTIAMGSSDGLRRGLDVKDLEHPIEVPVGKATLGRIMNVLGEPVDMKGEIGEEERWAIHRAAPSYEELSNSQELLETGIKVIDLMCPFAKGGKVGLFGGAGVGKTVNMMELIRNIAIEHSGYSVFAGVGERTREGNDFYHEMTDSNVIDKVSLVYGQMNEPPGNRLRVALTGLTMAEKFRDEGRDVLLFVDNIYRYTLAGTEVSALLGRMPSAVGYQPTLAEEMGVLQERITSTKTGSITSVQAVYVPADDLTDPSPATTFAHLDATVVLSRQIASLGIYPAVDPLDSTSRQLDPLVVGQEHYDTARGVQSILQRYQELKDIIAILGMDELSEEDKLVVARARKIQRFLSQPFFVAEVFTGSPGKYVSLKDTIRGFKGIMEGEYDHLPEQAFYMVGSIDEAVEKAKKL

SEQ ID NO: 192 - protein, 387 aa, Salmonella typhimurium
MSVIKMTDLDLAGKRVFIRADLNVPVKEGKVTSDARIRASLPTIELALKQGAKVMVTSHLGRPTEGEYNEEFSLLPVVNYLKDKLSNPVRLVKDYLDGVDVAEGELVVLENVRFNKGEKKDDEALSKKYAALCDVFVMDAFGTAHRAQASTHGIGKFADVACAGPLLAAELDALGKALKEPARPMVAIVGGSKVSTKLTVLDSLSKIADQLIVGGGIANTFVAAQGHSVGKSLYEADLVDEAKRLLTTCDIPVPTDVRVATEFSETAPATLKSVNDVKEDEQILDIGDASAQQLAEILKNAKTILWNGPVGVFEFPNFRKGTEIVANAIADSEAFSIAGGGDTLAAIDLFGIADKISYISTGGGAFLEFVEGKVLPAVAMLEERAKK

SEQ ID NO: 193 - protein, 892 aa, Salmonella typhimurium
MAVTNVAELNALVERVKKAQREYASFTQEQVDKIFRAAALAAADARIPLAKMAVAESGMGIVEDKVIKNHFASEYIYNAYKDEKTCGVLSEDDTFGTITIAEPIGIICGIVPTTNPTSTAIFKSLISLKTRNAIIFSPHPRAKEATNKAADIVLQAAIAAGAPKDLIGWIDQPSVELSNALMHHPDINLILATGGPGMVKAAYSSGKPAIGVGAGNTPVVIDETADIKRAVASVLMSKTFDNGVICASEQSVVVVDSVYDAVRERFASHGGYMLQGQELKAVQNVILKNGALNAAIVGQPAYKIAELAGFSVPETTKILIGEVTVVDESEPFAHEKLSPTLAMYRAKDFEEAVEKAEKLVAMGGIGHTSCLYTDQDNQPERVAYFGQMMKTARILINTPASQGGIGDLYNFKLAPSLTLGCGSWGGNSISENVGPKHLINKKTVAKRAENMLWHKLPKSIYFRRGSLPIALDEVITDGHKRALIVTDRFLFNNGYADQITSVLKAAGVETEVFFEVEADPTLSVVRKGAELANSFKPDVIIALGGGSPMDAAKIMWVMYEHPETHFEELALRFMDIRKRIYKFPKMGVKAKMIAVTTTSGTGSEVTPFAVVTDDATGQKYPLADYALTPDMAIVDANLVMDMPKSLCAFGGLDAVTHALEAYVSVLASEFSDGQALQALKLLKENLPASYHEGSKNPVARERVHSAATIAGIAFANAFLGVCHSMAHKLGSQFHIPHGLANALLICNVIRYNANDNPTKQTAFSQYDRPQARRRYAEIADHLGLSAPGDRTAAKIEKLLAWLESIKAELGIPKSIREAGVQEADFLAHVDKLSEDAFDDQCTGANPRYPLISELKQILLDTYYGRDFTEGEVAAKKDVVAAPKAEKKAKKSA

SEQ ID NO: 194 - protein, 234 aa, Salmonella typhimurium
MAKLTKRMRVIREKVDATKQYDINEAIALLKELATAKFNESVDVAVNLGIDARKSDQNVRGATVLPHGTGRSVRVAVFTQGPNAEAAKAAGAELVGMEDLADQIKKGEMNFDVVIASPDAMRVVGQLGQVLGPRGLMPNPKVGTVTPNVAEAVKNAKAGQVRYRNDKNGIIHTTIGKVDFDADKLKENLEALLVALKKAKPSQAKGVYIKKVSISTTMGAGVAVDQAGLSASAN

SEQ ID NO: 195 - protein, 206 aa, Salmonella typhimurium
MARYLGPKLKLSRREGTDLFLKSGVRAIDTKCKIEQAPGQHGARKPRLSDYGVQLREKQKVRRIYGVLERQFRNYYKEAARLKGNTGENLLALLEGRLDNVVYRMGFGATRAEARQLVSHKAIMVNGRVVNIASYQVSPNDVVSIREKAKKQSRVKAALELAEQREKPTWLEVDAGKMEGTYKRKPERSDLSADINEHLIVELYSK

SEQ ID NO: 196 - protein, 142 aa, Salmonella typhimurium [sequence omitted]

SEQ ID NO: 197 - protein, 362 aa, Salmonella typhimurium
MKLKLVAVAVTSLLAAGVVNAAEVYNKDGNKLDLYGKVHAQHYFSDDNGSDGDKTYARLGFKGETQINDQLTGFGQWEYEFKGNRTESQGADKDKTRLAFAGLKFADYGSFDYGRNYGVAYDIGAWTDVLPEFGGDTWTQTDVFMTGRTTGVATYRNTDFFGLVEGLNFAAQYQGKNDRDGAYESNGDGFGLSATYEYEGFGVGAAYAKSDRTNNQVKAASNLNAAGKNAEVWAAGLKYDANNIYLATTYSETLNMTTFGEDAAGDAFIANKTQNFEAVAQYQFDFGLRPSIAYLKSKGKNLGTYGDQDLVEYIDVGATYYFNKNMSTFVDYKINLLDDSDFTKAAKVSTDNIVAVGLNYQF

SEQ ID NO: 198 - protein, 272 aa, Salmonella typhimurium
MKSLFKATLLATTMAVAMHAPITFAADAAKPAATADSKAAFKNDDQKAAYALGASLGRYMENSLKEQEKLGIKLDKDQLIAGVQDAFADKSKLSDQEIEQTLQTFEARVKSAAQAKMEKDAADNEAKGKTFRDAFAKEKGVKTSSTGLLYKVEKEGTGEAPKDSDTVVVNYKGTLIDGKEFDNSYTRGEPLSFRLDGVIPGWTEGLKNIKKGGKIKLVIPPELAYGKTGVPGIPANSTLVFDVELLDIKPAPKADAKPADAADAKAADAAKK

SEQ ID NO: 199 - protein, 663 aa, Salmonella typhimurium
MSSRKELANAIRALSMDAVQKAKSGHPGAPMGMADIAEVLWRDFLNHNPTNPSWADRDRFVLSNGHGSMLIYSLLHLTGYDLPMSELQNFRQLHSKTPGHPEVGYTAGVETTTGPLGQGIANAVGMAIAEKTLAAQFNRPGHDIVDHFTYVFMGDGCMMEGISHEVCSLAGTLKLGKLIAFYDDNGISIDGHVEGWFTDDTAKRFEAYGWHVIRGIDGHDADAIKRATEEARAVTDKPSLLMCKTIIGFGSPNKQGTHDSHGAPLGDAEIALTREQLGWKYAPFEIPSEIYAQWDAKEAGQAKESAWNEKFAAYEKAFPQEAAEFTRRMKGDMPADFDAKANEFIAKLQANPSKIASRKASQNTIEAFGPLLPEFLGGSADLAPSNLTLWSGSKAINEDAAGNYIHYGVREFGMTAIANGIALHGGFLPYTSTFLMFVEYARNAVRMAALMKQRQVMVYTHDSIGLGEDGPTHQPVEQVASLRVTPNMSTWRPCDQVESAVAWKYGVERQDGPTALILSRQNLAQQERTEEQLANIARGGYVLKDCAGQPQIIFIATGSEVELAVAAYEKLTAEGVKARVVSMPSTDAFDKQDAAYRESVLPKAVSARVAIEAGIADYWFKYVGLNGAIVGMTTFGESAPAELLFEEFGFTVDNVIAKAKALL

SEQ ID NO: 200 - protein, 179 aa, Salmonella typhimurium
MAKLHDYYKDEVVNKLMTEFNYNSVMQVPRVEKITLNMGVGEAIADKKLLDNAAADLTAISGQKPLITKARKSVAGFKIRQGYPIGCKVTLRGERMWEFFERLITIAVPRIRDFRGLSAKSFDGRGNYSMGVREQIIFPEIDYDKVDRVRGLDITITTTAKSDEEGRALLAAFDFPFRK

SEQ ID NO: 201 - protein, 1407 aa, Salmonella typhimurium
MKDLLKFLKAQTKTEEFDAIKIALASPDMIRSWSFGEVKKPETINYRTFKPERDGLFCARIFGPVKDYECLCGKYKRLKHRGVICEKCGVEVTQTKVRRERMGHIELASPTAHIWFLKSLPSRIGLLLDMPLRDIERVLYFESYVVIEGGMTNLERQQILTEEQYLDALEEFGDEFDAKMGAEAIQALLKSMDLEQECETLREELNETNSETKRKKLTKRIKLLEAFVQSGNKPEWMILTVLPVLPPDLRPLVPLDGGRFATSDLNDLYRRVINRNNRLKRLLDLAAPDIIVRNEKRMLQEAVDALLDNGRRGRAITGSNKRPLKSLADMIKGKQGRFRQNLLGKRVDYSGRSVITVGPYLRLHQCGLPKKMALELFKPFIYGKLELRGLATTIKAAKKMVEREEAVVWDILDEVIREHPVLLNRAPTLHRLGIQAFEPVLIEGKAIQLHPLVCAAYNADFDGDQMAVHVPLTLEAQLEARALMMSTNNILSPANGEPIIVPSQDVVLGLYYMTRDCVNAKGEGMVLTGPKEAERIYRAGLASLHARVKVRITEYEKDENGEFVAHTSLKDTTVGRAILWMIVPKGLPFSIVNQALGKKAISKMLNTCYRILGLKPTVIFADQTMYTGFAYAARSGASVGIDDMVIPEKKHEIISEAEAEVAEIQEQFQSGLVTAGERYNKVIDIWAAANDRVSKAMMDNLQTETVINRDGQEEQQVSFNSIYMMADSGARGSAAQIRQLAGMRGLMAKPDGSIIETPITANFREGLNVLQYFISTHGARKGLADTALKTANSGYLTRRLVDVAQDLVVTEDDCGTHEGILMTPVIEGGDVKEPLRDRVLGRVTAEDVLKPGTADILVPRNTLLHEQWCDLLEANSVDAVKVRSVVSCDTDFGVCAHCYGRDLARGHIINKGEAIGVIAAQSIGEPGTQLTMRTFHIGGAASRAAAESSIQVKNKGSIKLSNVKSVVNSSGKLVITSRNTELKLIDEFGRTKESYKVPYGAVMAKGDGEQVAGGETVANWDPHTMPVITEVSGFIRFTDMIDGQTITRQTDELTGLSSLVVLDSAERTTGGKDLRPALKIVDAQGNDVLIPGTDMPAQYFLPGKAIVQLEDGVQISSGDTLARIPQESGGTKDITGGLPRVADLFEARRPKEPAILAEIAGIVSFGKETKGKRRLVITPVDGSDPYEEMIPKWRQLNVFEGERVERGDVISDGPEAPHDILRLRGVHAVTRYIVNEVQDVYRLQGVKINDKHIEVIVRQMLRKATIESAGSSDFLEGEQVEYSRVKIANRELEANGKVGATFSRDLLGITKASLATESFISAASFQETTRVLTEAAVAGKRDELRGLKENVIVGRLIPAGTGYAYHQDRMRRRAAGEQPATPQVTAEDASASLAELLNAGLGGSDNE

SEQ ID NO: 202 - protein, 118 aa, Salmonella typhimurium
MARIAGINIPDQKHAVIALTSIYGVGKTRSKAILAAAGIAENVKISELSEEQIDTLRDEVAKFVVEGDLRREISMSIKRLMDLGCYRGLRHRRGLPVRGQRTKTNARTRKGPRKPIKK

SEQ ID NO: 203 - protein, 187 aa, Salmonella typhimurium
MSLINTKIKPFKNQAFKNGEFIEVTEKDTEGRWSVFFFYPADFTFVCPTELGDVADHYEELQKLGVDVYSVSTDTHFTHKAWHSSSETIAKIKYAMIGDPTGALTRNFDNMREDEGLADRATFVVDPQGIIQAIEVTAEGIGRDASDLLRKIKAAQYVAAHPGEVCPAKWKEGEATLAPSLDLVGKI

SEQ ID NO: 204 - protein, 167 aa, Salmonella typhimurium
MAHIEKQAGELQEKLIAVNRVSKTVKGGRIFSFTALTVVGDGNGRVGFGYGKAREVPAAIQKAMEKARRNMINVALNNGTLQHPVKGVHTGSRVFMQPASEGTGIIAGGAMRAVLEVAGVHNVLAKAYGSTNPINVVRATIDGLENMNSPEMVAAKRGKSVEEILGK

SEQ ID NO: 205 - protein, 104 aa, Salmonella typhimurium [sequence omitted]

SEQ ID NO: 206 - protein, 167 aa, Salmonella typhimurium
MSTAKLVKTKASNLLYTRNDVSESDKKATVELLNRQVIQFIDLSLITKQAHWNMRGANFIAVHEMLDGFRTALTDHLDTMAERAVQLGGVALGTTQVINSKTPLKSYPLDIHNVQDHLKELADRYAVVANDVRKAIGEAKDEDTADIFTAASRDLDKFLWFIESNIE

SEQ ID NO: 207 - protein, 115 aa, Salmonella typhimurium
MSNIIKQLEQEQMKQNVPSFRPGDTVEVKVWVVEGTKKRLQAFEGVVIAIRNRGLHSAFTVRKISNGEGVERVFQTHSPVVDSIAVKRRGAVRKAKLYYLRERTGKAARIKERLN

SEQ ID NO: 208 - protein, 78 aa, Salmonella typhimurium
MSTIEERVKKIIGEQLGVKQEEVTNNASFVEDLGADSLDTVELVMALEEEFDTEIPDEEAEKITTVQAAIDYINGHQA

SEQ ID NO: 209 - protein, 416 aa, Salmonella typhimurium
MESKVVVPVEGKKITLQNGKLNVPENPIIPFIEGDGIGVDVTPAMLKVVDAAVEKAYKGERKISWMEIYTGEKSTQVYGQDVWLPAETLDLIRDYRVAIKGPLTTPVGGGIRSLNVALRQELDLYVCLRPVRYYQGTPSPVKHPELTDMVIFRENSEDIYAGIEWKADSADAEKVIKFLREEMGVKKIRFPEHCGIGIKPCSEEGTKRLVRAAIEYAITNDRDSVTLVHKGNIMKFTEGAFKDWGYQLARDEFGGELIDGGPWLKIKNPNTGKEIVVKDVIADAFLQQILLRPAEYDVIACMNLNGDYISDALAAQVGGIGIAPGANIGDECALFEATHGTAPKYAGQDKVNPGSIILSAEMMLRHMQWFEAADLIVKGMEGAIAAKTVTYDFERLMEGAKLLKCSEFGDAIIANM

SEQ ID NO: 210 - protein, 255 aa, Salmonella typhimurium
MRHPLVMGNWKLNGSRHMVNELVANLRKELTGVAGCDVAIAPPEMYIDLAKRAAAGSHIMLGAQNVDLNLSGAFTGETSAEMLKDIGAQYIIIGHSERRTYHKESDELIAKKFAVLKEQGLTPVLCIGETEAENEAGKTEEVCARQIDAVLKTQGAAAFEGAVIAYEPVWAIGTGKSATPAQAQAVHKFIRDHIAKADAKIAEQVIIQYGGSVNASNAAELFAQPDIDGALVGGASLKADAFAVIVKAAEAAKQA

SEQ ID NO: 211 - protein, 209 aa, Salmonella typhimurium
MIGLVGKKVGMTRIFTEDGVSIPVTVIEVEANRVTQVKDLANDGYRAVQVTTGAKKANRVTKPEAGHFAKAGVEAGRGLWEFRLAEGEEYTVGQSISVELFADVKKVDVTGTSKGKGFAGTVKRWNFRTQDATHGNSLSHRVPGSIGQNQTPGKVFKGKKMAGQMGNERVTVQSLDVVRVDAERNLLLVKGGVPGATGCDLIVKPAVKA

SEQ ID NO: 212 - protein, 241 aa, Salmonella typhimurium
MATVSMRDMLKAGVHFGHQTRYWNPKMKPFIFGARNKVHIINLEKTVPMFNEALAELNKISARKGKILFVGTKRAASEAVKEAANSCDQFFVNHRWLGGMLTNWKTVRQSIKRLKDLETQSQDGTFEKLTKKEALMRTRELEKLENSLGGIKDMGGLPDALFVIDADHEHIAIKEANNLGIPVFAIVDTNSDPDGVDFVIPGNDDAIRAVSLYLGAVAATVREGRSQDLASQAEESFVEAE

SEQ ID NO: 213 - protein, 714 aa, Salmonella typhimurium
MNVIAIMNHMGVYFKEEPIRELHRALEGLNFRIVYPNDREDLLKLIENNSRLCGVIFDWDKYNLELCEEISKLNEYMPLYAFANSYSTLDVSLNDLRMQVRFFEYALGAAADIAAKIRQNTDEYIDNILPPLTKALFKYVREGKYTFCTPGHMGGTAFQKSPVGSIFYDFFGPNTMKSDISISVSELGSLLDHSGPHKEAEEYIARVFNAERSYMVTNGTSTANKIVGMYSAPAGSTVLIDRNCHKSLTHLMMMSDITPIYFRPTRNAYGILGGIPQSEFQHATIAKRVKETPNATWPVHAVITNSTYDGLLYNTDYIKKTLDVKSIHFDSAWVPYTNFSPIYQGKCGMSGDRVEGKIIYETQSTHKLLAAFSQASMIHVKGDINEETFNEAYMMHTTTSPHYGIVASTETAAAMMKGNAGKRLINGSIERAIKFRKEIKRLKSESDGWFFDVWQPEHIDGAECWPLRSDSAWHGFKNIDNEHMYLDPIKVTILTPGMKKDGTMDEFGIPASLVAKYLDERGIIVEKTGPYNLLFLFSIGIDKTKALSLLRALTEFKRAFDLNLRVKNILPALYREAPEFYENMRIQELAQNIHKLVEHHNLPDLMYRAFEVLPKMVMTPYTAFQKELHGETEEVYLEEMVGRVNANMILPYPPGVPLVMPGEMITEESRPVLEFLQMLCEIGAHYPGFETDIHGAYRQADGRYTVKVLKENTK

SEQ ID NO: 214 - protein, 142 aa, Salmonella typhimurium
MYKTIIMPVDVFEMELSDKAIRHAEFLAQQDGVIHLLHVLPGSASMSLHRFAADVRRFEEHLQHEAETRLQTMVGHFSIDPSRIKTHVRFGSVRDVVNEMGEELDADVVVIGSRNPSITTHLLGSNASSVVRHATLPVLVVR

SEQ ID NO: 215 - protein, 200 aa, Salmonella typhimurium
MVLVTRQAPDFTAAAVLGSGEIVDKFNFKQHTNGKTTVLFFWPMDFTFVCPSELIAFDKRYEEFQKRGVEVVGVSFDSEFVHNAWRNTPVDKGGIGPVKYAMVADVKREIQKAYGIEHPDEGVALRGSFLIDANGIVRHQVVNDLPLGRNIDEMLRMVDALQFHEEHGDVCPAQWEKGKEGMNASPDGVAKYLAENISSL

SEQ ID NO: 216 - protein, 149 aa, Salmonella typhimurium
MQVILLDKVANLGSLGDQVNVKAGYARNFLVPKGKAVPATKKNVEYFEARRAELEAKLADVLAAANARAEKINALETVTIASKAGDEGKLFGSIGTRDIADAVTAAGVDVAKSEVRLPNGVLRTTGEHEVNFQVHSEVFAKVIINVVAE

SEQ ID NO: 217 - protein, 165 aa, Salmonella typhimurium
MALNLQDKQAIVAEVSEVAKGALSAVVADSRGVTVDKMTELRKAGREAGVYMRVVRNTLLRRVVEGTQFECLKDTFVGPTLIAYSMEHPGAAARLFKEFAKANAKFEVKAAAFEGELIPASQIDRLATLPTYEEAIARLMATMKEASAGKLVRTLAAVRDAKEAA

SEQ ID NO: 218 - protein, 82 aa, Salmonella typhimurium
MVTIRLARHGAKKRPFYQVVVTDSRNARNGRFIERVGFFNPIASEKEEGTRLDLDRIAHWVGQGATISDRVAALIKEVKKAA

SEQ ID NO: 219 - protein, 118 aa, Salmonella typhimurium [sequence omitted]

SEQ ID NO: 220 - protein, 470 aa, Salmonella typhimurium
MKKTKIVCTIGPKTESEEMLSKMLDAGMNVMRLNFSHGDYAEHGQRIQNLRNVMSKTGKKAAILLDTKGPEIRTIKLEGGNDVSLKAGQTFTFTTDKSVVGNNEIVAVTYEGFTSDLSVGNTVLVDDGLIGMEVTAIEGNKVICKVLNNGDLGENKGVNLPGVSIALPALAEKDKQDLIFGCEQGVDFVAASFIRKRSDVVEIREHLKAHGGENIQIISKIENQEGLNNFDEILEASDGIMVARGDLGVEIPVEEVIFAQKMMIEKCIRARKVVITATQMLDSMIKNPRPTRAEAGDVANAILDGTDAVMLSGESAKGKYPLEAVSIMATICERTDRVMNSRLDYNNDSRKLRITEAVCRGAVETAEKLEAPLIVVATQGGKSARAVRKYFPDATILALTTNEVTARQLVLSKGVVSQLVKEINSTDDFYRLGKDVALQSGLAQKGDVVVMVSGALVPSGTTNTASVHVL

SEQ ID NO: 221 - protein, 468 aa, Salmonella typhimurium
MSKQQIGVVGMAVMGRNLALNIESRGYTVSVFNRSREKTEEVIAENPGKKLVPYYTVKEFVESLETPRRILLMVKAGAGTDAAIDSLKPYLEKGDIIIDGGNTFFQDTIRRNRELSAEGFNFIGTGVSGGEEGALKGPSIMPGGQKDAYELVAPILTKIAAVAEDGEPCVTYIGADGAGHYVKMVHNGIEYGDMQLIAEAYSLLKGGLNLSNEELANTFTEWNNGELSSYLIDITKDIFTKKDEDGNYLVDVILDEAANKGTGKWTSQSALDLGEPLSLITESVFARYISSLKAQRVAASKVLSGPKAQPAGDKAEFIEKVRRALYLGKIVSYAQGFSQLRAASDEYHWDLNYGEIAKIFRAGCIIRAQFLQKITDAYAENADIANLLLAPYFKKIADEYQQALRDVVAYAVQNGIPVPTFSAAVAYYDSYRAAVLPANLIQAQRDYFGAHTYKRTDKEGIFHTEWLE

SEQ ID NO: 222 - protein, 176 aa, Salmonella typhimurium
MSLLNVPAGKELPEDIYVVIEIPANADPIKYEVDKESGALFVDRFMSTAMFYPCNYGYINHTLSLDGDPVDVLVPTPYPLQPGAVIRCRPVGVLKMTDESGEDAKLVAVPHTKLSKEYDHIKDVNDLPELLKAQITHFFEHYKDLEKGKWVKVDGWDNAEAAKAEIVASFERAAKK

SEQ ID NO: 223 - protein, 201 aa, Salmonella typhimurium [sequence omitted]

SEQ ID NO: 224 - protein, 142 aa, Salmonella typhimurium
MAKKVQAYVKLQVAAGMANPSPPVGPALGQQGVNIMEFCKAFNAKTDSIEKGLPIPVVITVYADRSFTFVTKTPPAAVLLKKAAGIKSGSGKPNKDKVGKISRAQLQEIAQTKAADMTGADIEAMTRSIEGTARSMGLVVED

SEQ ID NO: 225 - protein, 127 aa, Salmonella typhimurium
MRHRKSGRQLNRNSSHRQAMFRNMAGSLVRHEIIKTTLPKAKELRRVVEPLITLAKTDSVANRRLAFARTRDNEIVAKLFNELGPRFASRAGGYTRILKCGFRAGDNAPMAYIELVDRSEKTEAAAE

SEQ ID NO: 226 - protein, 388 aa, Salmonella typhimurium
MNLHEYQAKQLFARYGLPAPVGYACTTPREAEEAASKIGAGPWVVKCQVHAGGRGKAGGVKVVKSKEEIRAFAENWLGKRLVTYQTDANGQPVNQILVEAATDIGKELYLGAVVDRSSRRVVFMASTEGGVEIEKVAEETPHLIHKVALDPLTGPMPYQGRELAFKLGLEGKLVQQFTKIFMGLATIFLERDLALIEINPLVITKQGDLICLDGKLGADGNALFRQPDLREMRDQSQEDPREAQAAQWELNYVALDGNIGCMVNGAGLAMGTMDIVKLHGGEPANFLDVGGGATKERVTEAFKIILSDDNVKAVLVNIFGGIVRCDLIADGIIGAVEEVGVNVPVVVRLEGNNAELGAKKLADSGLNIIAAKSLTDAAQQVVAAVEGK

SEQ ID NO: 227 - protein, 177 aa, Salmonella typhimurium
MSRVAKAPVVVPAGVDVKINGQVITIKGKNGELTRTLNDAVEVKHADNALTFGPRDGYADGWAQAGTARALLNSMVIGVTEGFTKKLQLVGVGYRAAVKGNVVNLSLGFSHPVDHQLPAGITAECPTQTEIVLKGADKQVIGQVAADLRAYRRPEPYKGKGVRYADEVVRTKEAKKK

SEQ ID NO: 228 - protein, 359 aa, Salmonella typhimurium
MSKIFDFVKPGVITGDDVQKVFQVAKENNFALPAVNCVGTDSINAVLETAAKVKAPVIVQFSNGGASFIAGKGVKTDVPQGAAILGAISGAHHVHQMAEHYGVPVILHTDHCAKKLLPWIDGLLDAGEKHFAATGKPLFSSHMIDLSEESLHENIEICSKYLARMSKIGMTLEIELGCTGGEEDGVDNSHMDASALYTQPEDVDYAYTELSKISPRFTIAASFGNVHGVYKPGNVVLTPTILRDSQDYVSKKHNLPHNSLNFVFHGGSGSTAQEIKDSVSYGVVKMNIDTDTQWATWEGVLNYYKENEAYLQGQLGNPKGEDQPNKKYYDPRVWLRAGQTSMIARLEKAFKELNAIDVL

SEQ ID NO: 229 - protein, 865 aa, Salmonella typhimurium
MLEEYRKHVAERAAQGIVPKPLDATQMAALVELLKTPPVGEEEFLLDLLINRVPPGVDEAAYVKAGFLAAVAKGDTTSPLVSPEKAIELLGTMQGGYNIHPLIDALDDAKLAPIAAKALSHTLLMFDNFYDVEEKAKAGNEYAKQVMQSWADAEWFLSRPPLAEKITVTVFKVTGETNTDDLSPAPDAWSRPDIPLHAQAMLKNAREGIEPDQPGVVGPIKQIEALQKKGYPLAYVGDVVGTGSSRKSATNSVLWFMGDDIPNVPNKRGGGLCLGGKIAPIFFNTMEDAGALPIEVDVSNLNMGDVIDVYPYKGEVRNHETGELLATFELKTDVLIDEVRAGGRIPLIIGRGLTTKAREALGLPHSDVFRQAKDVAESSRGFSLAQKMVGRACGVKGIRPGAYCEPKMTSVGSQDTTGPMTRDELKDLACLGFSADLVMQSFCHTAAYPKPVDVTTHHTLPDFIMNRGGVSLRPGDGVIHSWLNRMLLPDTVGTGGDSHTRFPIGISFPAGSGLVAFAAATGVMPLDMPESVLVRFKGKMQPGITLRDLVHAIPLYAIKQGLLTVEKKGKKNIFSGRILEIEGLPDLKVEQAFELTDASAERSAAGCTIKLNKEPIVEYLTSNIVLLKWMIAEGYGDRRTLERRIQGMEKWLADPQLLEADADAEYAAVIDIDLADIKEPILCAPNDPDDARLLSDVQGEKIDEVFIGSCMTNIGHFRAAGKLLDNHKGQLPTRLWVAPPTRMDAAQLTEEGYYSVFGKSGARIEIPGCSLCMGNQARVADGATVVSTSTRNFPNRLGTGANVFLASAELAAVAALIGKLPTPEEYQTYVAQVDKTAVDTYRYLNFDQLSQYTEKADGVIFQTAV

SEQ ID NO: 230 - protein, 193 aa, Salmonella typhimurium
MSFELPALPYAKDALAPHISAETLEYHYGKHHQTYVTNLNNLIKGTAFEGKSLEEIVRTSEGGIFNNAAQVWNHTFYWNCLAPNAGGEPTGKLADAIAASFGSFAEFKAQFTDAAIKNFGSGWTWLVKSADGKLAIVSTSNAGTPLTTDATPLLTVDVWEHAYYIDYRNARPNYLEHFWALVNWEFVAKNLAA

SEQ ID NO: 231 - protein, 110 aa, Salmonella typhimurium [sequence omitted]

SEQ ID NO: 232 - protein, 542 aa, Salmonella typhimurium
MKTRDSQTSDVIIIGGGATGAGIARDCALRGLRVILVERHDIATGATGRNHGLLHSGARYAVTDAESARECISENQILKRIARHCVEPTDGLFITLPEDDLAFQATFIRACEAAGIRAEAIDPQQARIIEPSVNPALIGAVKVPDGTVDPFRLTAANMLDAREHGAIVLTAHEVTGLIREGATVCGVHVRNHLTGETQTLHAPVVVNAAGIWGQRIAEYADLSIRMFPAKGSLLIMDHRINQHVINRCRKPSDADILVPGDTISLIGTTSTHIDYNEIDSNRVTADEVDILLREGEKLAPVMAKTRILRAYSGVRPLVASDDDPSGRNVSRGIVLFDHAERDGLDGFITITGGKLMTYRLMAEWATDAVCRKLGNTRPCITADTPLPGSKESTEHTLKRIISLPAPLRGSAVYRHGDRTPGWLSEGRQHRSLVCECEAVTAGEVQYAVENLTVNSLLDLRRRTRVGMGTCQGELCACRAAGLLQRFNVTTAAQSITQLSEFLNERWKGVQPVAWGDALRESEFTRWVYQGLCGLEKEHQDEI

SEQ ID NO: 233 - protein, 329 aa, Salmonella typhimurium [sequence omitted]

SEQ ID NO: 234 - protein, 103 aa, Salmonella typhimurium
MQNQRIRIRLKAFDHRLIDQSTAEIVETAKRTGAQVRGPIPLPTRKERFTVLISPHVNKDARDQYEIRTHKRLVDIVEPTEKTVDALMRLDLAAGVDVQISLG

SEQ ID NO: 235 - protein, 1342 aa, Salmonella typhimurium
MVYSYTEKKRIRKDFGKRPQVLDVPYLLSIQLDSFQKFIEQDPEGQYGLEAAFRSVFPIQSYSGNSELQYVSYRLGEPVFDVQECQIRGVTYSAPLRVKLRLVIYEREAPEGTVKDIKEQEVYMGEIPLMTDNGTFVINGTERVIVSQLHRSPGVFFDSDKGKTHSSGKVLYNARIIPYRGSWLDFEFDPKDNLFVRIDRRRKLPATIILRALNYTTEQILDLFFEKVVFEIRDNKLQMELIPERLRGETASFDIEANGKVYVEKGRRITARHIRQLEKDDIKHIEVPVEYIAGKVVSKDYVDESTGELICAANMELSLDLLAKLSQSGHKRIETLFTNDLDHGPYISETVRVDPTNDRLSALVEIYRMMRPGEPPTREAAESLFENLFFSEDRYDLSAVGRMKFNRSLLRDEIEGSGILSKDDIIDVMKKLIDIRNGKGEVDDIDHLGNRRIRSVGEMAENQFRVGLVRVERAVKERLSLGDLDTLMPQDMINAKPISAAVKEFFGSSQLSQFMDQNNPLSEITHKRRISALGPGGLTRERAGFEVRDVHPTHYGRVCPIETPEGPNIGLINSLSVYAQTNEYGFLETPYRRVVDGVVTDEIHYLSAIEEGNYVIAQANSNLDDEGHFVEDLVTCRSKGESSLFSRDQVDYMDVSTQQVVSVGASLIPFLEHDDANRALMGANMQRQAVPTLRADKPLVGTGMERAVAVDSGVTAVAKRGGTVQYVDASRIVIKVNEDEMYPGEAGIDIYNLTKYTRSNQNTCINQMPCVSLGEPVERGDVLADGPSTDLGELALGQNMRVAFMPWNGYNFEDSILVSERVVQEDRFTTIHIQELACVSRDTKLGPEEITADIPNVGEAALSKLDESGIVYIGAEVTGGDILVGKVTPKGETQLTPEEKLLRAIFGEKASDVKDSSLRVPNGVSGTVIDVQVFTRDGVEKDKRALEIEEMQLKQAKKDLSEELQILEAGLFSRIRAVLVSSGVEAEKLDKLPRDRWLELGLTDEEKQNQLEQLAEQYDELKHEFEKKLEAKRRKITQGDDLAPGVLKIVKVYLAVKRRIQPGDKMAGRHGNKGVISKINPIEDMPYDENGTPVDIVLNPLGVPSRMNIGQILETHLGMAAKGIGDKINAMLKQQQEVAKLREFIQRAYDLGADVRQKVDLSTFSDDEVLRLAENLRKGMPIATPVFDGAKEAEIKELLKLGDLPTSGQITLFDGRTGEQFERPVTVGYMYMLKLNHLVDDKMHARSTGSYSLVTQQPLGGKAQFGGQRFGEMEVWALEAYGAAYTLQEMLTVKSDDVNGRTKMYKNIVDGNHQMEPGMPESFNVLLKEIRSLGINIELEDE

SEQ ID NO: 236 - protein, 711 aa, Salmonella typhimurium
MLNPIVRKFQYGQHTVTLETGMMARQATAAVMVSMDDTAVFVTVVGQKKAKPGQDFFPLTVNYQERTYAAGRIPGSFFRREGRPSEGETLIARLIDRPVRPLFPEGFVNEVQVIATVVSVNPQVNPDIVAMIGASAALSLSGIPFNGPIGAARVGYINDQYVLNPTQDELKESKLDLVVAGTEAAVLMVESEAELLSEDTMLGAVVFGHEQQQVVIQAINDLVKEAGKPRWDWQPEAVNDALNARVAALAESRLSDAYRITDKQERYAQVDVIKSETIEQLIAEDETLDANELGEILHAIEKNVVRSRVLAGEPRIDGREKDMIRGLDVRTGVLPRTHGSALFTRGETQALVTATLGTARDAQVLDELMGERTDSFLFHYNFPPYSVGETGMVGSPKRREIGHGRLAKRGVLAVMPDMDKFPYTVRVVSEITESNGSSSMASVCGASLALMDAGVPIKAAVAGIAMGLVKEGDNYVVLSDILGDEDHLGDMDFKVAGSRDGISALQMDIKIEGITKEIMQVALNQAKGARLHILGVMEQAINAPRGDISEFAPRIHTIKISTDKIKDVIGKGGSVIRALTEETGTTIEIEDDGTVKIAATDGEKAKYAIRRIEEITAEIEVGRIYNGKVTRIVDFGAFVAIGGGKEGLVHISQIADKRVEKVTDYLQMGQEVPVKVLEVDRQGRVRLSIKEATEQSQPAAAPEAPASEQAE

SEQ ID NO: 237 - protein, 78 aa, Salmonella typhimurium
MNRTKLVLGAVILGSTLLAGCSSNAKIDQLSSDVQTLNAKVDQLSNDVNAMRSDVQAAKDDAARANQRLDNQATKYRK

SEQ ID NO: 238 - protein, 312 aa, Salmonella typhimurium
MKVAVLGAAGGIGQALALLLKNQLPSGSELSLYDIAPVTPGVAVDLSHIPTAVKIKGFSGEDATPALEGADVVLISAGVARKPGMDRSDLFNVNAGIVKNLVQQIAKTCPKACVGIITNPVNTTVAIAAEVLKKAGVYDKNKLFGVTTLDIIRSNTFVAELKGKLPTEVEVPVIGGHSGVTILPLLSQIPGVSFTEQEAAELTKRIQNAGTEVVEAKAGGGSATLSMGQAAARFGLSLVRALQGEKGVVECAYVEGDGQYARFFSQPLLLGKNGVEERKSIGTLSAFEQHSLDAMLDTLKKDIQLGEDFINK

SEQ ID NO: 239 - protein, 427 aa, Salmonella typhimurium
MADTKAKITLTGDTTIELDVLKGTLGQDVIDIRSLGSKGVFTFDPGFTSTASCESKITFIDGDEGILLHRGFPIDQLATDSNYLEVCYILLYGEKPTQEEYDEFRTTVTRHTMIHEQITRLFHAFRRDSHPMAVMCGITGALAAFYHDSLDVNNPRHREIAAFRLLSKMPTMAAMCYKYSIGQPFVYPRNDLSYAGNFLNMMFSTPCETYEVNPVLERAMDRILILHADHEQNASTSTVRTAGSSGANPFACIAAGIASLWGPAHGGANEAALKMLEEISSVKHIPEFVRRAKDKNDSFRLMGFGHRVYKNYDPRATVMRETCHEVLKELGTKDDLLEVAMELEHIALNDPYFIEKKLYPNVDFYSGIILKAMGIPSSMFTVIFAMARTVGWIAHWNEMHTDGMKIARPRQLYTGYDKRDFKSALKR

SEQ ID NO: 240 - protein, 97 aa, Salmonella typhimurium
MSIRPLHDRVIVKRKEVESKSAGGIVLTGSAAGKSTRGEIIAVGKGRILDNGTVQPLDVKVGDIVIFNDGYGVKSEKIDNEEVLIMSESDILAIVEA

SEQ ID NO: 241 - protein, 441 aa, Salmonella typhimurium
MYHGQLKNILLLSLRFIMDKLSYASDSSTSAWNTYLQQIERVAPYLGELSPWVDTLRHPKRALIVDIPVQMDDGTIRHFEGYRVQHNLSRGPGKGGVRYHPDVDLNEVMALSAWMTIKCAALNLPYGGAKGGIRVDPFSLSEGELERLTRRYTSEIGIIIGPQKDIPAPDVGTNGKVMAWMMDTYSMNHGTTVTGVVTGKPIHLGGSLGREKATGRGVFVSGLEAARRANIAVEGARVAVQGFGNVGSEAARLFAGAGARVVAIQDHTATLFNATGIDMKALTAWQTEHKQIAGFPGAETIASDAFWRLEMDILIPAALEGQITRQRAEALTCKLVLEGANGPTYPDADDVLASRGILVVPDVVCNAGGVTVSYFEWVQDMASFFWSEEEINARMDKIMTDAIVHVWEKAAEKSCSLRTAAYIVACERILLARKDRGIYPG

SEQ ID NO: 242 - protein, 289 aa, Salmonella typhimurium
MSVLINKDTKVICQGFTGSQGTFHSEQAIAYGTQMVGGVTPGKGGTTHLGLPVFNTVREAVEATGATASVIYVPAPFCKDSILEAIDAGIKLIITITEGIPTLDMLTVKVKLDEAGVRMIGPNCPGVITPGECKIGIMPGHIHKPGKVGIVSRSGTLTYEAVKQTTDYGFGQSTCVGIGGDPIPGSNFIDILKLFQEDPQTEAIVMIGEIGGSAEEEAAAYIKDHVTKPVVGYIAGVTAPKGKRMGHAGAIIAGGKGTADEKFAALEAAGVKTVRSLADIGEALKAIIK

SEQ ID NO: 243 - protein, 317 aa, Salmonella typhimurium
MTDKLTSLRQFTTVVADTGDIAAMKLYQPQDATTNPSLILNAAQIPEYRKLIDDAVAWAKQQSSDRAQQVVDATDKLAVNIGLEILKLVPGRISTEVDARLSYDTEASIAKAKRIIKLYNDAGISNDRILIKLASTWQGIRAAEQLEKEGINCNLTLLFSFAQARACAEAGVYLISPFVGRILDWYKANTDKKDYAPAEDPGVVSVTEIYEYYKQHGYETVVMGASFRNVGEILELAGCDRLTIAPALLKELAESEGAIERKLSFSGEVKARPERITEAEFLWQHHQDPMAVDKLADGIRKFAVDQEKLEKMIGDLL

SEQ ID NO: 244 - protein, 957 aa, Salmonella typhimurium
MTQTLSQLENRGAFIERHIGPDAAQQQEMLNAVGAESLNALTGQIVPKDIQLATPPQVGEAATEYAALAELKAIAGRNKRFTSYIGMGYTAVQLPPVILRNMLENPGWYTAYTPYQPEVSQGRLEALLNFQQVTLDLTGLDMASASLLDEATAAAEAMAMAKRVSKLKNANRFFVASDVHPQTLDVVRTRAETFGFDVIVDDAAKALDHQDVFGVLLQQVGTTGEIHDYSALITELKSRKVVVSVAADFMALVLLTAPGKQGADIVFGSAQRFGVPMGYGGPHAAFFAAKDEFKRSMPGRIIGVSKDAAGNTALRMAMQTREQHIRREKANSNICTSQVLLANIASLYAVYHGPVGLKRIANRIHRLTDILAAGLQQKGLKLRHAHYFDTLCVEVADKAAVLARAEAAEINLRSDIHNAVGITLDETTTRENVAQLFNVLLGDSHGLNIETLDKDVALDSRSIQQSMLRDDAILTHPVFNRYHSETEMMRYMHSLERKDLALNQAMIPLGSCTMKLNAAAEMIPITWPEFAELHPFCPPEQAEGYHQMISQLSDWLVKLTGYDAVCMQPNSGAQGEYAGLLAIRHYHESRNEGHRDICLIPASAHGTNPASAHMAGMQVVVVACDKNGNIDLDDLRAKAEQHAANLSCIMVTYPSTHGVYEETIREVCEVVHQFGGQVYLDGANMNAQVGITSPGFIGADVSHLNLHKTFCIPHGGGGPGMGPIGVKAHLAPFVPGHSVVQIEGMLTRQGAVSAAPFGSASILPISWMYIRMMGAEGLKQASQVAILNANYIASRLKDAYPVLYTGRDGRVAHECILDIRPLKEETGISELDIAKRLIDYGFHAPTMSFPVAGTLMVEPTESEGKAELDRFIDAMLAIRAEIDQVKAGVWPLEDNPLVNAPHIQSELVAEWAHPYSREVAVFPAGVADKYWPTVKRLDDVYGDRNLFCSCVPISDYQ

SEQ ID NO: 245 - protein, 500 aa, Salmonella typhimurium
MNKEILAVVEAVSNEKALPREKIFEALESALATATKKKYEQEIDVRVEIDRKSGDFDTFRRWLIVEEVTMPTKEITLEAARFEDESLNVGDYVEDQIESVTFDRITTQTAKQVIVQKVREAERAMVVDQFRDQEGEIVTGVVKKVNRDNISLEIKSEGMAGNAEAVILREDMLPRENFRPGDRIRGVLYAVRPEARGAQLFVTRSKPEMLIELFRIEVPEIGEEVIEIKAAARDPGSRAKIAVKTNDKRIDPVGACVGMRGARVQAVSTELGGERIDIVLWDDNPAQFVINAMAPADVASIVVDEDKHTMDIAVEAGNLAQAIGRNGQNVRLASQLSGWELNVMTVDDLQAKHQAEAHAAIEIFTKYLDIDEEFATVLVEEGFSTLEELAYVPMKELLEIDGLDEPTVEALRERAKNALATLAQDQEASLGDNKPADDLLNLEGLDRDMAFKLAARGVCTLEDLADQGIDDLADIEGLTDEKAGELIMAARNICWFGDEA

SEQ ID NO: 246 - protein, 506 aa, Salmonella typhimurium
MAQVINTNSLSLLTQNNLNKSQSALGTAIERLSSGLRINSAKDDAAGQAIANRFTANIKGLTQASRNANDGISIAQTTEGALNEINNNLQRVRELAVQSANSTNSQSDLDSIQAEITQRLNEIDRVSGQTQFNGVKVLAQDNTLTIQVGANDGETIDIDLKQINSQTLGLDSLNVQKAYDVKDTAVTTKAYANNGTTLDVSGLDDAAIKAATGGTNGTASVTGGAVKFDADNNKYFVTIGGFTGADAAKNGDYEVNVATDGTVTLAAGATKTTMPAGATTKTEVQELKDTPAVVSADAKNALIAGGVDATDANGAELVKMSYTDKNGKTIEGGYALKAGDKYYAADYDEATGAIKAKTTSYTAADGTTKTAANQLGGVDGKTEVVTIDGKTYNASKAAGHDFKAQPELAEAAAKTTENPLQKIDAALAQVDALRSDLGAVQNRFNSAITNLGNTVNNLSEARSRIEDSDYATEVSNMSRAQILQQAGTSVLAQANQVPQNVLSLLR

SEQ ID NO: 247 - protein, 283 aa, Salmonella typhimurium
MAEITASLVKELRERTGAGMMDCKKALTEANGDIELAIENMRKSGAIKAAKKAGNVAADGVIKTKIDGNVAFILEVNCQTDFVAKDAGFQAFADKVLDAAVAGKITDVEVLKAQFEEERVALVAKIGENINIRRVASLEGDVLGSYQHGARIGVLVAAKGADEELVKQLAMHVAASKPEFVKPEDVSADVVEKEYQVQLDIAMQSGKPKEIAEKMVEGRMKKFTGEVSLTGQPFVMEPSKSVGQLLKEHNADVTGFIRFEVGEGIEKVETDFAAEVAAMSKQS

SEQ ID NO: 248 - protein, 297 aa, Salmonella typhimurium
MAKALQGVMAALLTPFDHQQQLDSESLRRLVRFNIGQGIDGLYVGGSTGEAFVQSLAEREQVLEIVAEEAKGKITLIAHVGTVSTAESQQLASAAKRYGFDAVSAVTPFYYPFSFEEHCDHYRAIIDSADGLPMVVYNIPALSGVKLTLDQINTLVTLPGVSALKQTSGDLFQMEQIRRAHPDLVLYNGYDEIFASGLLAGADGGIGSTYNIMGWRYQGIVQALREGDVAKAQRLQTECNKVIDLLIKTGVFRGLKTVLHYMDVVSVPLCRKPFAPVDEKYLPALKALAQQLMEEKA

SEQ ID NO: 249 - protein, 57 aa, Salmonella typhimurium [sequence omitted]

SEQ ID NO: 250 - protein, 513 aa, Salmonella typhimurium
MQLNSTEISELIKQRIAQFNVVSEAHNEGTIVSVSDGVIRIHGLADCMQGEMISLPGNRYAIALNLERDSVGAVVMGPYADLAEGMKVKCTGRILEVPVGRGLLGRVVNTLGAPIDGKGPVDNDGFSAVEAIAPGVIDRQSVDQPVQTGYKAVDSMIPIGRGQRELIIGDRQTGKTALAIDAIINQRDSGIKCIYVAIGQKASTISNVVRKLEEHGALANTIVVVATASESAALQYLAPYAGCAMGEYFRDRGEDALIIYDDLSKQAVAYRQISLLLRRPPGREAFPGDVFYLHSRLLERAARVNADYVEAFTKGEVKGKTGSLTALPIIETQAGDVSAFVPTNVISITDGQIFLESNLFNAGIRPAVNPGISVSRVGGAAQTKIMKKLSGGIRTALAQYRELAAFSQFASDLDDATRKQLDHGQKVTELLKQKQYAPMSVAQQSLVLFAAERGYLADVELAKIGSFEAALLAYVDRDHAPLMQEINQSGGYNDEIEGKLKGILDSFKATQSW

SEQ ID NO: 251 - protein, 123 aa, Salmonella typhimurium
MIQEQTMLNVADNSGARRVMCIKVLGGSHRRYAGVGDIIKITIKEAIPRGKVKKGDVLKAVVVRTKKGVRRPDGSVIRFDGNACVILNNNSEQPIGTRIFGPVTRELRNEKFMKIISLAPEVL

SEQ ID NO: 252 - protein, 759 aa, Salmonella typhimurium
MDEQLKQSALDFHEFPVPGKIQVSPTKPLATQRDLALAYSPGVAAPCLEIEKDPLAAYKYTARGNLVAVISNGTAVLGLGNIGALAGKPVMEGKGVLFKKFAGIDVFDIEVDELDPDKFINVVAALEPTFGGINLEDIKAPECFYIEQKLRERMNIPVFHDDQHGTAIISTAAILNGLRVVEKNISDVRMVVSGAGAAAIACMNLLVALGMQKHNIVVCDSKGVIYKGREPNMAETKAAYAVDDSGKRTLDEVIDGADIFLGCSGPKVLTQEMVKKMARAPMILALANPEPEILPPLAKEVRPDAIICTGRSDYPNQVNNVLCFPFIFRGALDVGATAINEEMKLAAVRAIAELAHAEQSEVVASAYGDQDLSFGPEYIIPKPFDPRLIVKIAPAVAKAAMDSGVATRPIADFDAYIDKLTEFVYKTNLFMKPIFSQARKDPKRVVLPEGEEARVLHATQELITLGLAKPILIGRPSVIEMRIQKLGLQIKAGVDFEIVNNESDPRFKEYWSEYYQIMKRRGITQEQAQRAMIGNHTAIGAIMVQRGEADAMICGTIGDYHEHFSVVKAVFGYRDGVHTAGAMNALLLPSGNTFIADTYVNEDPTPEQLAEIAVMAAETVRRFGIEPKVALLSHSNFGSSNSLSASKMRETLERVRERAPDLMIDGEMHGDAALVESIRNDRMPDSPLKGAANILVMPNMEAARISYNLLRVSSSEGVTVGPVLMGVSKPVHVLTPIASVRRIVNMVALAVVEAQTTPL

SEQ ID NO: 253 - protein, 144 aa, Salmonella typhimurium
MRLNTLSPAEGSKKAGKRLGRGIGSGLGKTGGRGHKGQKSRSGGGVRRGFEGGQMPLYRRLPKFGFTSRKAAITAEVRLSDLAKVEGGVVDLNTLKAANIIGIQIEFAKVILAGEVTTPVTVRGLRVTKGARAAIEAAGGKIEE

SEQ ID NO: 254 - protein, 315 aa, Salmonella typhimurium
MPDMKLFAGNATPELAQRIANRLYTSLGDAAVGRFSDGEVSVQINENVRGGDIFIIQSTCAPTNDNLMELVVMVDALRRASAGRITAVIPYFGYARQDRRVRSARVPITAKVVADFLSSVGVDRVLTVDLHAEQIQGFFDVPVDNVFGSPILLEDMLQLNLDNPIVVSPDIGGVVRARAIAKLLNDTDMAIIDKRRPRANVSQVMHIIGDVAGRDCVLVDDMIDTGGTLCKAAEALKERGAKRVFAYATHPIFSGNAANNLRNSVIDEVVVCDTIPLTDEIKALPNVRTLTLSGMLAEAIRRISNEESISAMFEH

SEQ ID NO: 255 - protein, 109 aa, Salmonella typhimurium
MSDKIIHLTDDSFDTDVLKADGAILVDFWAEWCGPCKMIAPILDEIADEYQGKLTVAKLNIDQNPGTAPKYGIRGIPTLLLFKNGEVAATKVGALSKGQLKEFLDANLA

SEQ ID NO: 256 - protein, 243 aa, Salmonella typhimurium
MKKVLIAALIAGFSLSATAAQTIRFATEASYPPFESMDANNKIVGFDVDLANALCKEIDASCTFTNQAFDSLIPSLKFRRFDAVMAGMDITPEREKQVLFTTPYYDNSALFVGQQGKYTSVDQLKGKKVGVQNGTTHQKFIMDKHPEITTVPYDSYQNAKLDLQNGRIDAVFGDTAVVTEWLKANPKLAPVGDKVTDKDYFGTGLGIAVRQGNTELQQKFNTALEKVKKDGTYETIYNKWFQK

SEQ ID NO: 257 - protein, 567 aa, Salmonella typhimurium
MSQRITIDPVTRIEGHLRIDCEIENGVVSKAWASGTMWRGMEEIVKNRDPRDAWMIVQRICGVCTTTHAISSVRAAESALNIDVPVNAQYIRNIILAAHTTHDHIVHFYQLSALDWVDITSALKADPEKASAMLDGVSSWHLNSAQEFTKVQNKIKDLVASGQLGIFANGYWGHPAMQLPPEVNLIAVAHYLQALECQRDANRVVALLGGKSPHIQNLAVGGVANPINLDSIGTLNLERLMYIKSFIDKLSDFVEQVYKVDTAVIAAYYPEWLERGKGAVNYLSAPEFPTDGKNGSFLFPGGYITNADLSTYRPITSHSDEFLIKGIQESAKHAWYKDEAPQAPWEGTTIPAYDGWSDDGKYSWVKSPTFYGKTVEVGPLANMLCKLAAGRESTQTKLNEIIALYQKLTGKTLEMAQLHSTLGRIIGRTVHCCELQNILQDQYNALIVNIGKGDYTTFVKPNIPATGEFKGVGFLEAPRGMLSHWMVIKDGIISNYQAVVPSTWNSGPRNFNDDVGPYEQSLVGTPIADPAKPLEVVRTIHSFDPCMACAVHVVDADGNEVVSVKVL

SEQ ID NO: 258 - protein, 165 aa, Salmonella typhimurium
MLKTEMIDKLNEQMNLELYSSLLYQQMSAWCSYHSFEGAAAFLRRHAQEEMTHMQRLFDYLTDTGSLPRIHTVSSPFAEYASLDELFRATYEHEQLITQKINELAHAAMTSQDYPTFNFLQWYVAEQHEEEKLFKSIIDKLTLAGKSGEGLYFIDKELSTLDTQN

SEQ ID NO: 259 - protein, 156 aa, Salmonella typhimurium
MNIIKANVAAPDARVAITIARFNQFINDSLLDGAVDALTRIGQVKDDNITVVWVPGAYELPLATEALAKSGKYDAVVALGTVIRGGTAHFEYVAGGASNGLASVAQDSGVPVAFGVLTTESIEQAIERAGTKAGNKGAEAALTALEMINVLKAIKA

SEQ ID NO: 260 - protein, 63 aa, Salmonella typhimurium
MKAKELREKSVEELNTELLNLLREQFNLRMQAASGQLQQSHLLKQVRRDVARVKTLLTEKAGA

SEQ ID NO: 261 - protein, 144 aa, Salmonella typhimurium
MNRTILVPIDISDSELTQRVISHVEAEAKIDDAKVHFLTVIPSLPYYASLGLAYSAELPAMDDLKAEAKSQLEAIIKKFNLPADRVQAHVAEGSPKDKILEMAKKLPADMVIIASHRPDITTYLLGSNAAAVVRHAECSVLVVR

SEQ ID NO: 262 - protein, 828 aa, Salmonella typhimurium
MKLSRRSFMKANAVAAAAAAAGLSVPGVARAVVGQQEAIKWDKAPCRFCGTGCGVLVGTQQGRVVACQGDPDAPVNRGLNCIKGYFLPKIMYGKDRLTQPMLRMKDGSYHKDGEFTPVSWEQAFDVMEEKFKTSLKEKGPEAIGMFGSGQWTIWEGYAAAKLFKAGFRSNNIDPNARHCMASAVVGFMRTFGMDEPMGCYDDIEQADAFVLWGSNMAEMHPILWSRITNRRLSDPNVKVAVLSTFQHRSFELADNGIVFTPQSDLVILNYIANYIIQNNAVNQDFFTKHVNLRKGATDIGYGLRPTHPLEKAAKNPGSDASEPMSFDEYKAFVAEYTLDKTAEMTGVPKDQLEQLAQLYADPNKRVISYWTMGFNQHTRGVWANNLVYNLHLLTGKISQPGCGPFSLTGQPSACGTAREVGTFSHRLPADMVVTNEKHRDICEKHWQIPAGTIPAKVGLHAVAQDRALKDGKLNVYWVMCNNNMQAGPNINEDRMPGWRDPRNFIIVSDPYPTVSALSADLILPTAMWVEKEGAYGNAERRTQFWRQQIKAPGEAKSDLWQLVQFSRRFKTEEVWPEALLAQKPELRGKTLYDVLFATPAVSKFPLSELKEDQLNDESRELGFYLQKGLFEEYAWFGRGHGHDLAPFDDYHNARGLRWPVVEGKETQWRYSEGNDPYVKAGEGYKFYGKPDGKAVIFALPFEPAAESPDNEYDLWLSTGRVLEHWHTGSMTRRVPELHRAFPEAVVFIHPLDAKARDLRRGDKVKVSSRRGEVISIVETRGRNRPPQGLVYMPFFDAAQLVNNLTLDATDPLSKETDFKKCAVKLAKV

SEQ ID NO: 263 - protein, 205 aa, Salmonella typhimurium
MTMTRLKISKTLLAVMLTSAVATGSAFAENATTDKAQSGTETAGQKVDSSMNKVGNFMDDSAITAKVKAALVDHDNIKSTDISVETNQKVVTLSGFVESQAQAEAAVKVAKGVEGVTSVSDKLHVRDNKEGSVKGYAGDTATTSEVKAKLLADDLVPSRKVKVETTDGVVQLSGTVETQEQSDRAESIAKAVDGVKSVKNDLKVQ

SEQ ID NO: 264 - protein, 334 aa, Salmonella typhimurium
MVISLKNRNFLKLLDYTPAEIQHLIDLAIELKAAKKAGCEKQTLIGKNIALIFEKTSTRTRCAFEVAAFDQGAQVTYLGPSGSQIGHKESMKDTARVLGRMYDGIEYRGFGQHIVEELGEYAGVPVWNGLTDEFHPTQILADLMTMLEHAPGKTLPELSFAYLGDARNNMGNSLMVGAAKMGMDIRLIAPKSFWPDAALVAQCREIASVTGARITLTESVEDGVHGVDFLYTDVWVSMGEPKEAWAERVSLMTPYQVNQQVVNATGNPDVKFMHCLPAFHNEHTKVGREIEMAYGLKGLEVTEEVFESAGSIVFDEAENRMHTIKAVMVATLGD

SEQ ID NO: 265 - protein, 129 aa, Salmonella typhimurium
MAKAPVRARKRVRKQVSDGVAHIHASFNNTIVTITDRQGNALGWATAGGSGFRGSRKSTPFAAQVAAERCADAVKEYGIKNLEVMVKGPGPGRESTIRALNAAGFRITNITDVTPIPHNGCRPPKKRRV

SEQ ID NO: 266 - protein, 1015 aa, Salmonella typhimurium
MQVSRRQFFKICAGGMAGTTAAALGFAPGVALAETRQYKLLRTRETRNTCTYCSVGCGLLMYSLGDGAKNAKASIFHIEGDPDHPVSRGALCPKGAGLVDFIHSESRLKFPQYRAPGSDKWQQISWEEAFDRIAKLMKEDRDANYQAQNAEGVTVNRWLTTGMLCASASSNETGYLTQKFSRALGMLAVDNQARVHGPTVASLAPTFGRGAMTNHWVDIKNANLVVVMGGNAAEAHPVGFRWAMEAKIHNGAKLIVIDPRFTRTASVADFYAPIRSGTDIAFLSGVMLYLLTNEKYNREYTEAYTNASLIVREDFGFDDGLFTGYDADKRQYDKTSWHYELDENGFAKHDTTLQHPRCVWNLLKQHVSRYTPDMVENICGTPKADFLKVCEYIAETSAKDKTASFLYALGWTQHSIGAQNIRTMAMIQLLLGNMGMAGGGVNALRGHSNIQGLTDLGLLSQSLPGYLTLPSEKQTDLQTYLAANTPKPLLKDQVNYWGNYPKFFVSMMKAFFGDKATAENSWGFDWLPKWDKGYDVLQYFEMMKQGKVNGYICQGFNPVASFPNKNKVVASLSKLKYLVTIDPLNTETSTFWQNHGESNDVDPAKIQTEVFRLPSTCFAEENGSIVNSGRWLQWHWKGADAPGIAMTDGEILAGIFLRLRKMYSEQGGANPEQVLNMTWNYTKPYEPASEEVAMESNGKALADLIDPATGAVVVKKGQQLSSFAQLRDDGTTSSGCWIFAGSWTPEGNMMARRDNADPSGLGNTLGWAWAWPLNRRILYNRASADPQGNPWDPKRQLLKWEGGKWAGWDIPDYSAAAPGSDVGPFIMQPEGMGRLFAIDKMAEGPFPEHYEPFETPLGTNPLHPNVISNPAARIFKDDADALGKADKFPYVGTTYRLTEHFHYWTKHALLNAIAQPEQFVEIGEKLANKLGIAHGDTVKVSSNRGYIKAKAVVTKRIRTLKADGKDIDTIGIPIHWGYEGVAKKGFIANTLTPFVGDANTQTPEFKSFLVNVEKV

SEQ ID NO: 267 - protein, 143 aa, Salmonella typhimurium
MAIERTFSIIKPNAVAKNVIGSIFARFEAAGFKIVGTKMLHLTVEQARGFYAEHDGKPFFDGLVEFMTSGPIVVSVLESENAVQRHRDLLGATNPANALAGTLRADYADSLTENGTHGSDSLESAQREIAFFFGEGEVCPRTR

SEQ ID NO: 268 - protein, 1174 aa, Salmonella typhimurium
MQTIDGNGAVASVAFRTSEVIAIYPITPSSTMAEQADAWAGNGLKNVWGDTPRVVEMQSEGGAIAAVHGALQTGSLSTSFTSSQGLLLMIPTLYKLAGQLTPFVLHVAARTVATHALSIFGDHSDVMAVRQTGCAMLCAASVQEAQDFALIAHRATLKSRVPFIHFFDGFRTSHEINKIIPLTNETILNLMPQAEIDAHRARALNPEHPVIRGTSANPDTYFQSREATNPWYNAVYDHVEEAMKAFGDATGRQYQPFEYYGHPQAERVIIMMGSALGTCEEVVDELLIRGEKVGVLKVRLFRPFSAKHLLQALPETVRAIAVLDRTKEPGAQAEPLYLDVMTALAEAFNNGERETLPRTIGGRYGLSSKEFGPACVLAVFNELSRAKPKPRFTVGIYDDVTNLSLPLPENTLPGSAKLEALFYGLGSDGSVSATKNNIKIIGNSTPWYAQGYFVYDSKKAGGLTVSHLRVSEKPIRSAYLIAQADFVGCHQLQFIDKYQMAERLKPGGIFLLNTPYSADEVWSRLPQEVQAVLNQKKARFYVVNAAKIARECGLGARINTVMQMAFFHLTHILPGDSALVELQGAIAKSYSSKGQDLVERNWQALALAQESLAEVPLQAVNPHSAHRPPVVSDAAPDFVKTVTAAMLAGLGDALPVSALPPDGTWPMGTTRWEKRNIAEEIPVWKEELCTQCNHCVAACPHSAIRAKVVSPQAMENAPASLHSLDVKSRDMRGQKYVLQVAPEDCTGCNLCVEVCPAKDRQDPQIKAINMMSRLEHVEEEKVNYDFFLDLPEIERSKLERIDIRTSQLITPLFEYSGACSGCGETPYIKLLTQLYGDRMLIANATGCSSIYGGNLPSTPYTTDANGRGPAWANSLFEDNAEFGLGFRLSVDQHRARVMRLLAQFADRIPAELNDALHAEATPDVRREQVAALRQHLKSVAGAEELLKDADALVEKSIWLIGGDGWAYDIGFGGLDHVLSLTENVNILVLDTQCYSNTGGQASKATPLGAVTKFGEHGKRKARKDLGVSMMMYGHVYVAQISLGAQLNQTVKAIQEAEAWPGPSLIIAYSPCEEHGYDLALSHDQMRQLTATGFWPLYRFDPRRADEGKPPLALDSRPPSDALAETLLNEQRFRRLNAQQPEVAEQLWRDAALDLQKRYDFLALLAGKAEKPGAD

SEQ ID NO: 269 - protein, 189 aa, Salmonella typhimurium
MKLVHIVSGLAVAISLAACADKSADIQTPAPNPNMSITANQSTIQQPNVSGTVWIRQKVALPPDAVLTVTLSDASLADAPSKVLSQKAVRTEGKQAPFSFVLPFNPSDIQPNARILLSAAITVDNKLVFITDSVKPVINNGGTKADLTLVPVQQTAVPVQASGGATTTVPSTSPTQVNSSSAVPAPTQY

SEQ ID NO: 270 - protein, 322 aa, Salmonella typhimurium
SKIYEDNSLTIGHTPLVRLNRIGNGRILAKVESRNPSFSVKCRIGANMIWDAEKRGVLKPGVELVEPTNGNTGIALAYVAAARGYKLTLTMPETMSIERRKLLKALGANLVLTEGAKGMKGAIQKAEEIVASDPQKYLLLQQFSNPANPEIHEKTTGPEIWEDTDGQVDVFISGVGTGGTLTGVTRYIKGTKGKTDLITVAVEPTDSPVIAQALAGEEIKPGPHKIQGIGAGFIPGNLDLKLIDKVVGITNEEAISTARRLMEEEGILAGISSGAAVAAALKLQEDESFTNKNIVVILPSSGERYLSTALFADLFTEKELQQ

SEQ ID NO: 271 - protein, 71 aa, Salmonella typhimurium
MPVIKVRENEPFDVALRRFKRSCEKAGVLAEVRRREFYEKPTTERKRAKASAVKRHAKKLARENARRTRLY

SEQ ID NO: 272 - protein, 732 aa, Salmonella typhimurium
MSELKIAVSRHCPDCFSTHRNIVNVDESRFIDVAAIVLSIDDIEHGKLDEIDATGYGIPVFVATHDEGRVPPEYLPRISGVFEYNESRTAFYGRQLETAASHYETQLRPPFFRALVDYVNQGNSAFDCPGHQGGEFFRRHPAGNQFVEYFGETLFRSDLCNADVAMGDLLIHEGAPCIAQQHAAKVFNADKTYFVLNGTSSSNKVVLNALLTPGDLVLFDRNNHKSNHHGALLQAGATPVYLETARNPYGFIGGIDAHCFEEDYLRELISEVAPQRAREARPFRLAVIQLGTYDGTIYNARQVVDKIGHLCDYILFDSAWVGYEQFIPMMADCSPLLLELNENDPGILVTQSVHKQQAGFSQTSQIHKKDSHIKGQSRYVPHKRMNNAFMMHASTSPFYPLFAALDVNAKMHEGVSGRNMWMDCVVNGIDARKLILENCHHIRPFVPELIDGKPWQSYPTSEIASDLRFFHFVPGEHWHAFEGYAEHQYFVDPCKLLLTTPGINAASGEYEDFGVPATILANFLRENGVVPEKCDLNSILFLLTPAEDMAKLQQLVALLARFEKLLEADAPLAEVLPSIYKQHEARYAGYTLRQLCQEMHDLYARHNVKQLQKEMFRKSHFPKVSMNPQEANYAYLRGEVELVRLPEAEGRIAAEGALPYPPGVLCVVPGEIWGGSVLRYFSALEEGINLLPGFAPELQGVYIEEHDGRKQVWCYVIKPRDAQRSLLKEEKL

SEQ ID NO: 273 - protein, 244 aa, Salmonella typhimurium
MAEMKNLKVEVVRYNPETDTAPHSAFYEVPYDETTSLLDALGYIKDNLSPDLSYRWSCRMAICGSCGMMVNNVPKLACKTFLRDYTNGMKVEALANFPIERDLVVDMTHFIESLEAIKPYIIGNSRTPDQGPNVQTPAQMAKYHQFSGCINCGLCYAACPQFGLNPEFIGPAAITLAHRYNEDSRDHGKKERMAQLNSPNGVWTCTFVGYCSEVCPKHVDPAAAIQQGKVESSKDFLIATLKPR

SEQ ID NO: 274 - protein, 419 aa, Salmonella typhimurium
MKFDTVIMGGGLAGLLCGLQLQQHGLRCAIVTRGQSALHFSSGSLDLLSALPDGQPVTDITAGLDALCRQAPEHPYSRLGAQKVLTLAQQAQTLLNASGAQLYGDVQQAHQRVTPLGTLRSTWLSSPEVPVWPLSAQRICVVGVSGLLDFQAHLAAASLRQRDLNVETAEIDLPELDVLRDNPTEFRAVNIARLLDNEEKWPLLYDALSPIATNCDMIIMPACFGLANDTLWRWLNERLPCALTLLPTLPPSVLGIRLHNQLQRQFVRQGGIWMPGDEVKKVTCRRGTVSEIWTRNHADIPLRPRFAVLASGSFFSSGLVAEREGIREPILGLDVQQTATRAEWYQQHFFDPQPWQQFGVVTDDAFRPSLAGNTVENLYAIGSVLAGFDPIAEGCGGGVCAVSALQAAHHIAERAGEQQ

SEQ ID NO: 275 - protein, 169 aa, Salmonella typhimurium
MGLFDKLKSLVSDDKKDTGTIEIVAPLSGEIVNIEDVPDVVFAEKIVGDGIAIKPTGNKMVAPVDGTIGKIFETNHAFSIESDSGIELFVHFGIDTVELKGEGFKRIAEEGQRVKVGDPVIEFDLPLLEEKAKSTLTPVVISNMDEIKELIKLSGSVTVGETPVIRIKK

SEQ ID NO: 276 - protein, 91 aa, Salmonella typhimurium [sequence omitted]

SEQ ID NO: 277 - protein, 196 aa, Salmonella typhimurium
MKVAKDLVVSLAYQVRTEDGVLVDESPVSAPLDYLHGHGSLISGLETALEGHEVGDKFDVAVGANDAYGQYDENLVQRVPKDVFMGVDELQVGMRFLAETDQGPVPVEITEVEDDHVVVDGNHMLAGQNLKFNVEVVAIREATEEELAHGHVHGAHDHHHDHGEDGCCGGHGHDHGHEHGGEGCCGGGGKGGCGCH

SEQ ID NO: 278 - protein, 887 aa, Salmonella typhimurium
MSERFQNDVDPIETRDWLQAIESVIREEGVERAQYLIDQLLSEARKGGVKVAAGAGASNYINTIAVEDEPEYPGNLELERRIRSAIRWNAIMTVLRASKKDLELGGHMASFQSSATIYDVCFNHFFRARNEQDGGDLVYFQGHISPGIYARAFLEGRLTQEQMDNFRQEVHGNGLSSYPHPKLMPEFWQFPTVSMGLGPIGAIYQAKFLKYLEHRGLKDTSKQTVYAFLGDGEMDEPESKGAITIATREKLDNLVFVINCNLQRLDGPVTGNGKIVNELEGIFAGAGWNVIKVMWGGRWDELLRKDTSGKLIQLMNETVDGDYQTFKSKDGAYVREHFFGKYPETAALVADWTDEQIWALNRGGHDPKKVYAALKKAQETKGKATVILAHTIKGYGMGDTAEGKNIAHQVKKMNMDGVRYVRDRFNVPVADADLEKLPYITFPEGSEEHKYLHERRQALHGYLPSRQPNFTEKLELPQLSDFGALLEEQSKEISTTIAFVRALNVMLKNKSIKDRLVPIIADEARTFGMEGLFRQIGIYSPNGQQYTPQDREQVAYYKEDEKGQILQEGINELGAGASWLAAATSYSTNDLPMIPFYIYYSMFGFQRIGDLCWQAGDQQARGFLIGGTSGRTTLNGEGLQHEDGHSHIQSLTIPNCISYDPAYAYEVAVIMHDGLERMYGEKQENVYYYITTLNENYHMPAMPAGAEEGIRKGIYKLETLEGSKGKVQLLGSGSILRHVREAAQILAKDYGVGSDVYSVTSFTELARDGQDCERWNMLHPLETPRVPYIAQVMNDAPAVASTDYMKLFAEQVRTYVPADDYRVLGTDGFGRSDSRENLRHHFEVDASYVVVAALGELAKRGEIDKKVVADAITKFNIDADKVNPRLA

SEQ ID NO: 279 - protein, 714 aa, Salmonella typhimurium
MSRIIMLIPTGTSVGLTSVSLGVIRAMERKGVRLSVFKPIAQPRAGGDAPDQTTTIVRANSTLPAAEPLKMSHVESLLSSNQKDVLMEEIIANYHANTKDAEVVLVEGLVPTRKHQFAQSLNYEIAKTLNAEIVFVMSQGTDTPEQLNERIELTRSSFGGAKNTNITGVIINKLNAPVDEQGRTRPDLSEIFDDSSKAQVIKIDPAKLQESSPLPVLGAVPWSFDLIATRAIDMARHLNATIINEGDIKTRRVKSVTFCARSIPHMLEHFRAGSLLVTSADRPDVLVAACLAAMNGVEIGALLLTGGYEMDARISKLCERAFATGLPVFMVNTNTWQTSLSLQSFNLEVPVDDHERIEKVQEYVANYVNAEWIESLTATSERSRRLSPPAFRYQLTELARKAGKRVVLPEGDEPRTVKAAAICAERGIATCVLLGNPDEINRVAASQGVELGAGIEIVDPEVVRESYVARLVELRKSKGMTEPVAREQLEDNVVLGTLMLEQDEVDGLVSGAVHTTANTIRPPLQLIKTAPGSSLVSSVFFMLLPEQVYVYGDCAINPDPTAEQLAEIAIQSADSAIAFGIEPRVAMLSYSTGTSGAGSDVEKVREATRLAQEKRPDLMIDGPLQYDAAVMADVAKSKAPNSPVAGRATVFIFPDLNTGNTTYKAVQRSADLISIGPMLQGMRKPVNDLSRGALVDDIVYTIALTAIQASQQQQ

SEQ ID NO: 280 - protein, 69 aa, Salmonella typhimurium
MSKIKGNVKWFNESKGFGFITPEDGSKDVFVHFSAIQTNGFKTLAEGQRVEFEITNGAKGPSAANVTAL

SEQ ID NO: 281 - protein, 549 aa, Salmonella typhimurium
MKNINPTQTSAWQALQKHYDEMKDVTIAELFANDSDRFAKFSATFDDLMLVDFSKNRITEETLAKLQDLAKETDLAGAIKSMFSGEKINRTEDRAVLHVALRNRSNTPIIVDGKDVMPEVNAVLEKMKTFSQAIISGQWKGYTGKAITDVVNIGIGGSDLGPFMVTEALRPYKNHLTMHFVSNVDGTHIAEVLKKVNPETTLFLVASKTFTTQETMTNAHSARDWFLKTAGDEKHVAKHFAALSTNAKAVGEFGIDTANMFEFWDWVGGRYSLWSAIGLSIILSVGFDNFVELLSGAHAMDKHFSTTPAEKNLPILLALIGIWYNNFFGAETEAILPYDQYMHRFAAYFQQGNMESNGKYVDRNGNAVDYQTGPIIWGEPGTNGQHAFYQLIHQGTKMVPCDFIAPAITHNPLSDHHQKLLSNFFAQTEALAFGKSREVVEQEYRDQGKDPAQLEHVVPFKVFEGNRPTNSILLREITPFSLGALIALYEHKIFTQGVILNIFTFDQWGVELGKQLANRILPELGDDKAISSHDSSTNGLINRYKAWRA

SEQ ID NO: 282 - protein, 1018 aa, Salmonella typhimurium
MIPQISQAPGVVQLVLNFLQALEQQGFTGDTATSYADRLTMSTDNSIYQLLPDAVVFPRSTADVALLARLAAEPRFTSLIFTPRGGGTGTNGQALNQGIIVDMSRYMNRIIEINPEEGWVRVEAGVIKDQLNQALKPYGYFFAPELSTSNRATLGGMINTDASGQGSLVYGKTSDHVLGIRAVLLGGDILDTQSMPVELARTLGENTTTPGRIYQTVYQSCLENRQLILDSFPKLNRFLTGYDLRHVFNDDMTRFDLTRILTGSEGTLAFITEARLDITPIPKVRRLVNVKYDSFDSALRNAPFMVDARALSVETVDSKVLNLAREDIVWHSVSELITDVPDKEMLGLNIVEFAGDDEALIDGQVEALCHRLDGLMARAEAGVIGWQLCTDLTGIERIYAMRKKAVGLLGNAKGAAKPIPFAEDTCVPPEHLADYIAEFRALLDGHGLSYGMFGHVDAGVLHVRPALDMCDPQQELLMKQISDEVVALTARYGGLLWGEHGKGFRAEYSPAFFGEVLYGELRKIKAAFDPHNRLNPGKICPPQGIEAPMMKVDAVKRGTWDRQIPLAVRQTWRGAMECNGNGLCFNFDAKSPMCPSMKISLNRIHSPKGRATLVREWLRLLADRGVDPLKLEKELPEKRASLRTLIARTRNSWHKRKGEYDFSHEVKEAMSGCLACKACTTQCPIKIDVPEFRSRFLQLYHTRYLRPVRDHLVATVETYAPLMARAPKTFNFFINQPVVRNLAKKHIGMVDLPLLSAPSLQQQLVGHPSANMTLEQLERMSAEQKAKTVLVVQDPFTSYYDARVVADFIRLAEKLGRRPVLLPFSPNGKAQHIKGFLNRFAKTAKKTSEFLNRIAALGMPMVGVDPALVLCYRDEYKLALGEQRGDFHVLLVHEWLAQEINARLSVEVSGEPWYFFGHCTEVTALPGAPAQWAAIFAHFGAKLENVSVGCCGMAGTYGHELTNHKNSLGIYELSWHQAMQRLPRNRCLATGYSCRSQVKRIEGTGVRHPLQALLEIIG

SEQ ID NO: 283 - protein, 136 aa, Salmonella typhimurium
MLQPKRTKFRKMHKGRNRGLAAGADVSFGSFGLKAVGRGRLTARQIEAARRAMTRAVKRQGKIWIRVFPDKPITEKPLAVRMGKGKGNVEYWVALIQPGKVLYEMDGVPEELAREAFKLAAAKLPIKTTFVTKTVM

SEQ ID NO: 284 - protein, 1294 aa, Salmonella typhimurium
MTQRLPLVAAQPGIWMAEKLSDLPSAWSVAHYVELNGELDAALLAKAVAVGMQQADTLRMRFTEENGEVWQWIDPEHTFGEPPIADLRDQPDPHHAALALMQADLRQNLRADSGKPLAFHQLIRIDDTRWYWYQRYHHLLVDGFSFPAITRQIAAIYRAWQSDAPTPESPFTPFADVVEEYQRYRQSEAWQRDGAFWAQQRRELPPPASMSAAPLPGRSASADILRMKLSAPAGAFRQLAAHMPEIPRADLALALVTLWLGRLCGRMDYAAGFIFMRRMGSAALTATGPVLNVLPLAVNLHATEDLPTLAKRLAAQLKKMRRHQRYDAEQIVRDSGRAAGETPLFGPVLNIKVFDYHLDLPGIQAQTHTLATGPVNDLELALFPDENGGLDIELLANAQRYDDATLSRHALRLMALITQFADNPALRCGDAQMLLAEEQTQLAHLNNTAVTIPAATLSDLVAQQAQKTPEASALADAHYHFTYREMREQVVALAYALRERGVQPGDSVAVALPRSVFLTLALHGIVEAGAAWLPLDTGYPDDRLRMMLEDAQPKLLITTQAQLARFHDIPGMEYLCYSQPLPVSDATPLRLSLPHHTAYIIFTSGSTGRPKGVMVGQTAIVNRLLWMQDHYPLTADDVVAQKTPCSFDVSVWEFFWPFIAGAKLVMAEPEAHRDPLAMQRFFAQYGVTTTHFVPSMLAAFIASLTPASAGKSCASLKRVFCSGEALPTALCREWETLTNAPLHNLYGPTEAAVDVSWYPACGDELAAVDGNSIPIGYPVWNTGLRILDAHMQPVPPGVAGDLYLTGIQLAQGYLGRPDLTASRFIADPFAPGERMYRTGDVARWLDSGAVEYLGRSDDQLKIRGQRIELGEIDRVMQTLPDVEQAVAHACVFNQAAATGGDARQLVGYLVSHSGLPLDLPALQEKLRQKLPAHMVPVVLLQLASLPLSANGKLDRKALPLPDLAPRVKGRAPQSATEIAVAAAFSRLLGCEINDVESDFFALGGHSLLAMKLAAQLSQTFNRQVTPGQVMVASDVAQLSKLLDTDDDERSRNLGFGPLLPLRESDGPTLFCFHPASGFAWQFSVLSRYLSPSWSIMGIQSPRPAGPMQTATTLDEVCEHHLATLLARQPHGPYYLLGYSLGGTLAQGIAARLRARGETVAFLGLLDTWPPETQNWREKEANGLNPDVLAEIERERAAFVAAQQGNASDALFTAIEGNYADAVRLLTTAHSVPFDGHATLFVADKTVPEGVSPEQSWSPWIASLAIYRQPCAHVDIISPSAFETIGPIISELINK

SEQ ID NO: 285 - protein, 273 aa, Salmonella typhimurium
MAVVKCKPTSPGRRHVVKVVNPELHKGKPFAPLVEKNSKSGGRNNNGRITTRHIGGGHKQAYRIVDFKRNKDGIPAVVERLEYDPNRSANIALVLYKDGERRYILAPKGLKAGDQIQSGVDAAIKAGNTLPMRNIPVGSTVHNVEMKPGKGGQLARSAGTYVQIVARDGAYVTLRLRSGEMRKVEADCRATLGEVGNAEHMLRVLGKAGAARWRGVRPTVRGTAMNPVDHPHGGGEGRNFGKHPVTPWGVQTKGKKTRSNKRTDKFIVRRRSK

SEQ ID NO: 286 - protein, 319 aa, Salmonella typhimurium
MSLNFLDFEQPIAELEAKIDSLTAVSRQDEKLDINIDEEVHRLREKSVELTRKIFADLGAWQVAQLARHPQRPYTLDYVRLAFDEFDELAGDRAYADDKAIVGGIARLEGRPVMIIGHQKGRETKEKIRRNFGMPAPEGYRKALRLMEMAERFNMPIITFIDTPGAYPGVGAEERGQSEAIARNLREMSRLNVPVICTVIGEGGSGGALAIGVGDKVNMLQYSTYSVISPEGCASILWKSADKAPLAAEAMGIIAPRLKELKLIDSIIPEPLGGAHRNPEAMAASLKAQLLEDLADLDVLSTDDLKNRRYQRLMSYGYA

SEQ ID NO: 287 - protein, 294 aa, Salmonella typhimurium
MINKIFALPVIEQLTPVLSRRQLDDLDLIVVDHPQVKASFALQGAHLLSWKPVGEEEVLWLSNNTPFKTGVALRGGVPICWPWFGPAAQQGLPSHGFARNLPWALKAHNEDDNGVMLTFELQSSEATRKYWPHDFTLLARFKVGKTCEIELEAHGEFATTSALHSYFNVGDIANVKVSGLGDRFIDKVNDAKEGVLTDGIQTFPDRTDRVYLNPEACSVIHDATLNRTIDVVHHHHLNVVGWNPGPALSVSMGDMPDDGYKTFVCVETVYATAPQQATEEKPSRLAQTICVAKR

SEQ ID NO: 288 - protein, 480 aa, Salmonella typhimurium
MSRRLRRTKIVTTLGPATDRDNNLEKVIAAGANVVRMNFSHGSPEDHKMRADKVREIAAKLGRHVAILGDLQGPKIRVSTFKEGKVFLNIGDKFLLDANLGKGEGDKEKVGIDYKGLPADVVPGDILLLDDGRVQLKVLEVQGMKVFTEVTVGGPLSNNKGINKLGGGLSAEALTEKDKADIQTAALIGVDYLAVSFPRCGEDLNYARRLARDAGCDAKIVAKVERAEAVCDQNAMDDIILASDVVMVARGDLGVEIGDPELVGIQKALIRRARQLNRAVITATQMMESMITNPMPTRAEVMDVANAVLDGTDAVMLSAETAAGQYPSETVAAMARVCLGAEKIPSINVSKHRLDVQFDNVEEAIAMSAMYAANHLKGVTAIITMTESGRTALMTSRISSGLPIFAMSRHERTLNLTALYRGVTPVHFDSAADGVVAAHEAVNLLRDKGYLVSGDLVIVTQGDVMSTVGSTNTTRILTVE

SEQ ID NO: 289 - protein, 378 aa, Salmonella typhimurium
MKVKVLSLLVPALLVAGAANAAEIYNKDGNKLDLFGKVDGLHYFSDDKGSDGDQTYMRIGFKGETQVNDQLTGYGQWEYQIQGNQTEGSNDSWTRVAFAGLKFADAGSFDYGRNYGVTYDVTSWTDVLPEFGGDTYGADNFMQQRGNGYATYRNTDFFGLVDGLDFALQYQGKNGSVSGENTNGRSLLNQNGDGYGGSLTYAIGEGFSVGGAITTSKRTADQNNTANARLYGNGDRATVYTGGLKYDANNIYLAAQYSQTYNATRFGTSNGSNPSTSYGFANKAQNFEVVAQYQFDFGLRPSVAYLQSKGKDISNGYGASYGDQDIVKYVDVGATYYFNKNMSTYVDYKINLLDKNDFTRDAGINTDDIVALGLVYQF

SEQ ID NO: 290 - protein, 417 aa, Salmonella typhimurium
MLKREMNIADYDAELWQAMEQEKVRQEEHIELIASENYTSPRVMQAQGSQLTNKYAEGYPGKRYYGGCEYVDVVEQLAIDRAKELFGADYANVQPHSGSQANFAVYTALLQPGDTVLGMNLAQGGHLTHGSPVNFSGKLYNIVPYGIDESGKIDYDEMAKLAKEHKPKMIIGGFSAYSGVVDWAKMREIADSIGAYLFVDMAHVAGLIAAGVYPNPVPHAHVVTTTTHKTLAGPRGGLILAKGGDEELYKKLNSAVFPSAQGGPLMHVIAGKAVALKEAMEPEFKVYQQQVAKNAKAMVEVFLNRGYKVVSGGTENHLFLLDLVDKNLTGKEADAALGRANITVNKNSVPNDPKSPFVTSGIRIGSPAVTRRGFKEAEVKELAGWMCDVLDNINDEATIERVKAKVLDICARFPVYA

SEQ ID NO: 291 - protein, 78 aa, Salmonella typhimurium
MSRVCQVTGKRPVTGNNRSHALNATKRRFLPNLHSHRFWVESEKRFVTLRVSAKGMRIIDKKGIETVLSELRARGEKY

SEQ ID NO: 292 - protein, 390 aa, Salmonella typhimurium
MPDLSAAEFTLLQGAHLFAPEDRGICDVLLANGKIIAVGAGIPGDIVPDCTVINLSGRMLCPGFIDQHVHLIGGGGEAGPTTRTPEVSLSRLTEAGITTVVGLLGTDSVSRHPASLLAKTRALNEEGITAWMLTGAYHVPSPTITGSVEKDVALIDRVIGVKCAVSDHRSAAPSGNQLASMAAESRVGGLLGGKPGVSVFHMGSSKKGLQPLYDILENSDVPIGKLLPTHVNRSESLFEQALAFALKGGVIDITTSIPDPVAPAEGIARAVKAGVPLSRVTLSSDGNGSQPLFDAAGNLTGIGVAGFESLLETLQTLVNHYGFSLANALRPLTTSVAAFLSLDGKGEIRPGNDADLLVFSADLRIEQVYARGKRMVNEGKACVKGTFEPA

SEQ ID NO: 293 - protein, 948 aa, Salmonella typhimurium
MKYLASFRTTLKVSRYLFRALALLIWLLIAFVSVFYIVNALHQRESEIRQEFNLSSDQAQRFIQRTSDVMKELKYIAENRLTAENGVMSSRARDDKMVVPDFEPLFADSDCAAMGSAWRGSLESLAWFMRYWRDNFSAAYDLNRVFLIGSDNLCMANFGLREMPVERDDALKALHERIMKYRNAPQEESGNNLFWISQGARQGVGYFYALTPVYLANRLQALLGVEQSIRMENFFTPGSLPMGVTIIDENGHSLISLTGPDGIIKAEPRWMQERSWFGYTPGFRELVLKKSLPPSSLSIVYSVPVDLVLERIRILILNAILLNVLVGAGLFTLARMYERRIFIPAESDAQRLEEHEQFNRKIVASAPVGICILRTIDGVNILSNELAHTYLNMLTHEDRQRLTQIICGQQVNFVDVLTSNNTNLQISFVHSRYRNENVAICVLVDVSTRVKMEESLQEMAQAAEQASQSKSMFLATVSHELRTPLYGIIGNLDLLQTKELPKGVERLVTAMNNSSSLLLKIISDILDFSKIESEQLKIEPREFSPREVMNHITANYLPLVVRKQLGLYCFIEPDVPVSLNGDPMRLQQVISNLLSNAIKFTDIGCIVLHVRCDGDYLSIRVRDTGVGIPAKEVVRLFDPFFQVGTGVQRNFQGTGLGLAICEKLISMMDGDISVDSEPGMGSQFTLRIPLYGAQYPVKKSVEGLAGTCCWLAVRNTSLCQFIETSLARSGVHTQRYEGQEPAADDILIVDDALEHTWQGRAAVVFCRRHIGIPLERAPGEWVHSVASVHELPALLARIYSIELDSEALSSALPTTDKTADSNDDMMILVVDDHPINRRLLADQLGSLGYQCKTANDGVDALNVLSKNAIDIVLSDVNMPNMDGYRLTQRIRQLGLTLPVVGVTANALAEEKQRCLESGMDSCLSKPVTLDVLKQTLAVYAERVRKTRA

SEQ ID NO: 294 - protein, 1644 aa, Salmonella typhimurium
MKHLRVVACMIMLALAGCDNNDKTAPTTKSEAPAVAQPSPAQDPAQLQKLAQQSQGKALTLLDASEAQLDGAATLVLTFSIPLDPEQDFSRVVHVVDKKSGSVDGAWELAPNLKELRLRHLEPERVLVVTVDPAVKALNNATFGKSYEKTITTRDVQPSVGFASRGSLLPGKIAEGLPVMALNVNHVDVNFFRVKPGSLASFVSQWEYRSSLSNWESDNLLKMADLVYTGRFDLNPARNTREKLLLPLSDIKPLQQAGVYVAVMNQAGHYNYSNAATLFTLSDIGVSAHRYHNRLDIFTQSLENGAAQSGIEIVLLNDKGQTLAQATSDAQGHVQLEADKAAALLLARKEEQTTLLDLTLPALDLSEFNVAGAPGYSKQFFMFGPRDLYRPGETVILNGLLRDSDGKTLPDQPVKLEVVKPDGQVMRTVVSQPENGLYRLNYPLDINAPTGLWHVRANTGDNLLRSWDFHVEDFMPERMALNLTAQKTPLAPADEVKFSVVGYYLYGAPANGNTLQGQLFLRPLRDAVAALPGFQFGNIAEENLSRSLDEVQLTLDKGGRGEVSAASQWQEAHSPLQVILQASLLESGGRPVTRRVEQAIWPADTLPGIRPQFAAKAVYDYRTDTTVNQPIVDEDSNAAFDIVYANAQGEKKAVSGLQVRLIRERRDYYWNWSESEGWQSQFDQKDLVEGEQTLDLNADETGKVSFPVEWGAYRLEVKAPNETVSSVRFWAGYSWQDNSDGSGAARPDRVTLKLDKANYRPGDTMKLHIAAPVAGKGYAMVESSDGPLWWQAIDVPAQGLELTIPVDKTWNRHDLYLSTLVVRPGDKSRSATPKRAVGLLHLPLGDDNRRLDLALESPAKMRPNQPLTVRVKASVKHGEMPKQINVLVSAVDSGVLNITDYATPDPWQAFFGQKRYGADIYDIYGQVIEGQGRLAALRFGGDGDDLKRGGKPPVNHVNIIAQQAQPITLNEQGEGVVTLPIGDFNGELRVMAQAWTADDFGRGESKVVVAAPVIAELNMPRFLAGGDVSRLVLDVTNLTDRPQTLNIALAASGLLELLSQQPQPVNLAPGVRTTLFVPVRALEGFGEGEIQATISGLNLPGETLDAQHKQWQIGVRPAWPAQTVNSGIALAPGESWHVPEQHLANISPATLQGQLLLSGKPPLNLARYIRELKAYPYGCLEQTTSGLFPALYTNAAQLQSLGITGDSDEKRRAAVDIGISRILQMQRDNGGFALWDENGAEEPWLTAYAMDFLIRAGEQGYSVPPEAINRGNERLLRYLQDPGTMLIRYSDNTQASTFAAQAYAALVLARQQKAPLGTLREIWERRSQAASGLPLMQLGIALNTMGDARRGEEAITLALNTPRQDERQWIADYGSSLRDNALMLSLLEENNLRPDAQNALLSSLSEQAFGQRWLSTQENNALFLAAHSRQASAGAWQVQTSLEAQPLSGDKALTRNLDADQLAALEVTNTGSQPLWLRLDSSGYPSSAPEPASNVLQIERQILGTDGQRKSLSSLRSGELVLVWLTVVADRNVPDALVVDLLPAGLELENQNLADSSASLPESGSEVQNLLNQMQQADIQYMEFRDDRFVAAVVVNEGQPVTLVYLARAVTPGTYQLAQPQVESMYAPQWRATGASEGLLIVTP

SEQ ID NO: 295 - protein, 144 aa, Salmonella typhimurium
MSLREALEKAEEAGVDLVEISPNAEPPVCRIMDYGKFLYEKSKSSKEQKKKQKVIQVKEIKFRPGTDEGDYQVKLRSLIRFLEEGDKAKITLRFRGREMAHQQIGMEVLNRVKDDLQELAVVESFPTKIEGRQMIMVLAPKKKQ

SEQ ID NO: 296 - protein, 586 aa, Salmonella typhimurium
MTITKLAWRDLVPDSESYQEIFAQPHATDENDTLLSDTQPRLQFALEQLIQPWASSSFMLTKAPEEQEYLTLLSDAVRALQTDAGQLTGGHYDVSGHTVHYRAAQNAQDNFATVTQVVSADWVEAEQLFGCLRQYNGDITLQPGLVHQANGGVLIISLRTLLAQPLLWMRLKAIVSRERFDWVAFDESRPLPVSVPSMPLKLKVILVGERESLADFQEMEPELAEQAIYSEFEDNLQIADAEAMTLWCQWVTRIALRDNLPPPAPDAWPVLIREAVRYTGEQDTLPLCPLWIARQFKEASPLCEGDTCGAEALSLMLARREWREGFLAERMQDEILQEQILIETEGERVGQINALSVIEFPGHPRAFGEPSRISCVVHIGDGEFNDIERKAELGGNIHAKGMMIMQAFLMSELQLEQQIPFSASLTFEQSYSEVDGDSASMAELCALISALANVPVNQNIAITGSVDQFGRAQPVGGLNEKIEGFFAICEQRELNGKQGVIIPAANVRHLSLKSELLQAVKEEKFTIWAVDDVTDALPLLLNLVWDGEGQTTLMQTIQERIAQATQQEGRHRFPWPLRWLNAFIPN

SEQ ID NO: 297 - protein, 192 aa, Salmonella typhimurium
MNHLTNQYVMLHDEKRCIGCQACTVACKVLNDVPEGFSRVQVQIRAPEQASNALTHFQFVRVSCQHCENAPCVSVCPTGASYRDENGIVQVDKSRCIGCDYCVAACPFHVRYLNPQTGVADKCNFCADTRLAAGQSPACVSVCPTDALKFGRLDESEIQRWVGQKEVYRQQEARSGAVSLYRRKEVHQEGKA

SEQ ID NO: 298 - protein, 402 aa, Salmonella typhimurium
MSSVDILVPDLPESVADATVATWHKKPGDAVVRDEVLVEIETDKVVLEVPASADGILDAVLEEEGTTVTSRQILGRLREGNSAGKETSAKSEEKASTPAQRQQASLEEQNNDALSPAIRRLLAEHNLEASAIKGTGVGGRLTREDVEKHLAKGESKAPAVEPAAQPALGARGEKRVPMTRLRKRVAERLLEAKNSTAMLTTFNEVNMKPIMDLRKQYGEVFEKRHGIRLGFMSFYVKAVVEALKRYPEVNASIDGDDVVYHNYFDVSMAVSTPRGLVTPVLRDVDTLGMADIEKKIKELAVKGRDGKLTVEDLTGGNFTITNGGVFGSLMSTPIINPPQSAILGMHAIKDRPMAVDGKVEILPMMYLALSYDHRLIDGRESVGFLVTIKELLEDPTRLLLDV

SEQ ID NO: 299 - protein, 155 aa, Salmonella typhimurium
MSEQNNTEMAFQIQRIYTKDVSFEAPNAPHVFQKDWQPEVKLDLDTASSQLADDVYEVVLRVTVTASLGEETAFLCEVQQAGIFSISGIEGTQMAHCLGAYCPNILFPYARECITSLVSRGTFPQLNLAPVNFDALFMNYLQQQAGEGTEEHQDA

SEQ ID NO: 300 - protein, 522 aa, Salmonella typhimurium
MLDIVELSRLQFALTAMYHFLFVPLTLGMAFLLAIMETVYVLSGKQIYKDMTKFWGKLFGINFALGVATGLTMEFQFGTNWSYYSHYVGDIFGAPLAIEGLMAFFLESTFVGLFFFGWDRLSKVQHMCVTWLVALGSNLSALWILVANGWMQNPIAADFNFETMRMEMVSFSELVLNPVAQVKFVHTVASGYVTGAMFILGISAYYMLKGRDFAFAKRSFAIAASFGMAAVLSVIVLGDESGYEMGDVQKTKLAAIEAEWETQPAPASFTLFGIPDQDKQENHLAIQIPYALGIIATRSVDTPVIGLKDLMVQHEERIRNGMKAYELLEQLRAGSTDQAVRDQFNSMKKDLGYGLLLKRYTPNVTDATEAQIQQATKDSIPRVAPLYFAFRIMVACGFLLLAIIALSFWSVIRNRIGEKKWLLRAALYGIPLPWIAVEAGWFVAEYGRQPWAIGEVLPTAVANSSLTVGDLLFSMFLICGLYTLFLVAELFLMFKFARLGPSSLKTGRYHFEQSTVTSQPAR

SEQ ID NO: 301 - protein, 96 aa, Salmonella typhimurium
MEALGMIETRGLVALIEASDAMVKAARVKLVGVKQIGGGLCTAMVRGDVAACKAATDAGAAAAQRIGELVSVHVIPRPHGDLEEVFPISFKGDSNI

SEQ ID NO: 302 - protein, 332 aa, Salmonella typhimurium
MNKKVLTLSAVMASLLFGAHAHAADTRIGVTIYKYDDNFMSVVRKAIEKDGKSAPDVQLLMNDSQNDQSKQNDQIDVLLAKGVKALAINLVDPAAAGTVIEKARGQNVPVVFFNKEPSRKALDSYDKAYYVGTDSKESGVIQGDLIAKHWQANQGWDLNKDGKIQYVLLKGEPGHPDAEARTTYVVKELNDKGIQTEQLALDTAMWDTAQAKDKMDAWLSGPNANKIEVVIANNDAMAMGAVEALKAHNKSSIPVFGVDALPEALALVKSGAMAGTVLNDANNQAKATFDLAKNLAEGKGAADGTSWKIENKIVRVPYVGVDKDNLSEFTQK

SEQ ID NO: 303 - protein, 128 aa, Salmonella typhimurium
MSKTIATENAPAAIGPYVQGVDLGSMVITSGQIPVDPKTGAVAEDVSAQARQSLENVKAIVEAAGLKVGDIVKTTVFVKDLNDFATVNATYEAFFTEHNATFPARSCVEVARLPKDVKIEIEAIAVRR

SEQ ID NO: 304 - protein, 629 aa, Salmonella typhimurium
MAIEIKVPDIGTDEVEITEILVKVGDKVEAEQSLITVEGDKASMEVPSPQAGVVKEIKVSVGDKTETGALIMIFDSAEGAADAAPAKAEEKKEAAPAAAPAAAAAKDVHVPDIGSDEVEVTEVMVKVGDTVEAEQSLITVEGDKASMEVPAPFAGTVKEIKVNTGDKVSTGSLIMVFEVAGEAGAAAPAKAEAAPAAAAPAAATGVKDVNVPDIGGDEVEVTEVMVKVGDKVTAEQSLITVEGDKASMEVPAPFAGTVKEIKISTGDKVKTGSLIMVFEVEGAAPAAAPAKQEAAAPAPAAKAEKPAAPAAKAEGKSEFAENDAYVHATPLIRRLAREFGVNLAKVKGTGRKGRILREDVQAYVKDAIKRAERAPAAAGGGIPGMLPWPKVDFSKFGEVEEVELGRIQKISGANLSRNWVMIPHVTHFDKTDITDLEAFRKQQNAEAEKRKLDVKYTPVVFIMKAVAAALEQMPRFNSSLSEDGQRLTLKKYINIGVAVDTPNGLVVPVFKDVNKKSVTELSRELTTISKKARDGKLTAGEMQGGCFTISSIGGLGTTHFAPIVNAPEVAILGVSKSAMEPVWNGKEFVPRLMMPISLSFDHRVIDGADGARFITIINNMLSDIRRLVM

SEQ ID NO: 305 - protein, 248 aa, Salmonella typhimurium
MKSLLKVSLAALTLAFAVSSHAADKKLVVATDTAFVPFEFKQGDKYVGFDVDLWDAIAKELKLDYTLKPMDFSGIIPALQTKNIDLALAGITITDERKKAIDFSDGYYKSGLLVMVKANNNDIKSVKDLDGKVVAVKSGTGSVDYAKANIKTKDLRQFPNIDNAYMELGTNRADAVLHDTPNILYFIKTAGNGQFKAVGESLEAQQYGVAFPKGSDELREKVNGALKTLRENGTYNEIYKKWFGTEPK

SEQ ID NO: 306 - protein, 372 aa, Salmonella typhimurium
MPSIFEKYQLKQVINASGRMTALGVSTPRPEVIDAAMAGMNQYFEMKDLVNKTGEYIAKLLEVEGATVVSCASAGLAQSVAAVLVQDSDWLLENLHVTPIENNEIVLPKGHNVNFGAPVGTMVALGGGKLVEAGYANECSAAQLAAAITPRTAAILYIKSHHCVQKSMLSVEQAAVVARTHNLPLIVDAAAEEDLQCYYRVGADLVIYSGAKAIEGPTSGLVIGKTQYVEWVKRQSAGIGRAMKVGKEGIVGLTCAIELYLRAQKESGAEMVEKMAPFIDTLNTFNGVSARVVWDSAGRDIARTEIKFDEAVTGIATGELVDALKQGEYAIYFRGYKANEGIIEADVRSVDRAQLAIVARRIGEVINQEKQA

SEQ ID NO: 307 - protein, 713 aa, Salmonella typhimurium
MNIIAIMGPHGVYYKDEPIKELERALQSLGFQIIWPQNSVDLLKFIEHNPRICGVIFDWDEYSLDLCSEINQLNEYLPLYAFINTNSTLDVSVHDMRMALWFFEYALGLAEDIATRIHQYTNEYLDNITPPFTKALFTYAKEGKYTFCTPGHMAGTAYQKSPPGCLFYDFFGGNTLKADVSISVTELGSLLDHTGPHLEAEEYIARTFGAEQSYMVTNGTSTSNKIVGMYAAPAGSTLLIDRNCHKSLAHLLMMSDVVPLWLKPTRNALGILGGIPRREFTRASIESKIEETPQAQWPVHAVITNSTYDGLLYNTNWIKQMLDVPSIHFDSAWVPYTHFHPIYQGKSGMSGDRVPGKVIFETQSTHKMLAAFSQASLIHIKGEYDEETFNEAFMMHTSTSPSYPIVASIETAAAMLRGNPGKRLINRSVERALHFRKEVQRLREESDSWFFDIWQPEEVDEAECWPVTPGETWHGFTDADDDHMFLDPVKVTILTPGMDEQGNMSEEGIPAALVAKFLDERGVVVEKTGPYNLLFLFSIGIDKTRAMGLLRGLTEFKRAYDLNLRVKNMLPDLYAEDPDFYRNMRIQDLAQGIHKLIRQHDLPGLMLRAFEVLPEMIMTPHQAWQRQIKGEVETVALDQLPGRVSANMILPYPPGVPLLMPGERITQQSRAVLDFLLMLCSIGQHYPGFETDIHGAKRNEDGVYQVRVLKHAC

SEQ ID NO: 308 - protein, 526 aa, Salmonella typhimurium
MNSTLIDSLLARRRAVSPWAGLYFLQSLLINLALGYPFSLLYTAAFTCLLLLLWRYLPRGQKALLGICSLVAACYFPFGQAYGAPNFNTLLALHSTNMEESSEILTIFPWYSYLTGLFIFALGIIALRRRKEEARPRWNSLDSLCLLISVAAFFVAPVQNLAWGGVFKVIDTGYPVFRFAKDVIVNNNEVIEEQHRMAQLSGIKDSWTVTAVKPRYHIYVVVIGESARRDAMGAFGGHWDNTPFASHVNGDFFMDYIAASGSTQKSLGLTLNRVVDNKPQYQDNFVTLANRAGFQTWWFSNQGQIGEYDTAIASIAKRADEAHFLKNGDFEADKNTRDEALLTMTAQVLATERTQPQLIVLHLMGSHPQACDRTQGKYATFVQSKETSCYLYTMTQTDDLLRQLYTQLRHSGDSFSLVYFSDHGLAFKERGKAVQYLAHDDKFQQNFQVPFMVLSSDSKAHRIIKARRSANDFLSFFSQWTGISAKEIKNRYRFISEQKAGPVYITNFKLQKVDYNHLGSDIFSLK

SEQ ID NO: 309 - protein, 87 aa, Salmonella typhimurium
MANIKSAKKRAVQSEKARKHNASRRSMMRTFIKKVYAAIEAGDKAAALKAFNEMQPIVDRQAAKGLIHKNKAARHKANLTAQINKLA

SEQ ID NO: 310 - protein, 910 aa, Salmonella typhimurium
MLMATIHVDGKEYEVNGADNLLQACLSLGLDIPYFCWHPALGSVGACRQCAVKQYQNAEDTRGRLVMSCMTPATDGTFISIDDEEAKQFRESVVEWLMTNHPHDCPVCEEGGNCHLQDMTVMTGHSFRRYRFTKRTHRNQDLGPFISHEMNRCIACYRCVRYYKDYADGTDLGVYGAHDNVYFGRPEDGTLESEFSGNLVEICPTGVFTDKTHSERYNRKWDMQFAPSICQQCSIGCNISPGERYGELRRIENRYNGTVNHYFLCDRGRFGYGYVNLKDRPRQPVQRRGDDFITLNAEQAMQGAADILRQSKKVIGIGSPRASIESNFALRELVGAENFYTGIARGEQERLQLALKVLREGGIYTPALREIESYDAVLVLGEDVTQTGARVALAVRQAVKGKAREMAAAQKVADWQIAAILNIGQRAKHPLFVTNVDDTRLDDIAAWTYRAPVEDQARLGFAIAHALDNTAPAVDGIDSDLQNKIDVIVQALAGAKKPLIISGTNAGSSEVIQAAANVAKALKGRGADVGITMIARSVNSMGLGMMGGGSLDDALGELETGSADAVVVLENDLHRHASATRVNAALAKAPLVMVVDHQRTAIMENAHLVLSAASFAESDGTVINNEGRAQRFFQVYDPAYYDNKTIMLESWRWLHSLHSTVENREVDWTQLDHVIDAVIAAMPQFAGIKDAAPDATFRIRGQKLAREPHRYSGRTAMRANISVHEPRQPQDKDTMFAFSMEGNNQPTAPRSEIPFAWAPGWNSPQAWNKFQDEVGGKLRHGDPGVRLIEATEGGLDYFTTVPASFQAQDGQWRIAPYYHLFGSDELSQRSPVFQSRMPQPYIKLNPADAAKLGVNAGTRVSFSYDGNTVTLPVEISEGLAAGQVGLPMGMPGIAPVLAGARLEDLREAQQ

SEQ ID NO: 311 - protein, 449 aa, Salmonella typhimurium
MLDKIVIANRGEIALRILRACKELGIKTVAVHSSADRDLKHVLLADETVCIGPAPSVKSYLNIPAIISAAEITGAVAIHPGYGFLSENANFAEQVERSGFIFIGPKADTIRLMGDKVSAITAMKKAGVPTVPGSDGPLGDDMNANRAHAKRIGYPVIIKASGGGGGRGMRVVRSDAELAQSISMTKAEAKAAFSNDMVYMEKYLENPRHIEIQVLADGQGNAIYLAERDCSMQRRHQKVVEEAPAPGITPELRRYIGERCAKACVDIGYRGAGTFEFLFENGEFYFIEMNTRIQVEHPVTEMITGVDLIKEQLRIAAGQPLSITQDEVVVRGHAVECRINAEDPNTFLPSPGKITRFHAPGGFGVRWESHIYAGYTVPPYYDSMIGKLICYGENRDVAIARMKNALQELIIDGIKTNIDLQTRIMNDEHFQHGGTNIHYLEKKLGLQEK

SEQ ID NO: 312 - protein, 407 aa, Salmonella typhimurium
MKRAFIMVLDSFGIGATEDADRFGDVGSDTLGHIAEACAKGEADNGRKGPLNLPNLTRLGLVKAHEGSTGKIAAGMDGNADVIGAYAWAHELSSGKDTPSGHWEIAGVPVLFDWGYFSDHENSFPQELLDKLVKRANLPGYLGNCHSSGTVILDQLGEEHMKTGKPIFYTSADSVFQIACHEETFGLDKLYELCEIAREELTEGGYNIGRVIARPFIGDKAGNFQRTGNRHDLAVEPPAPTVLQKLVDEKQGHVVSVGKIADIYANCGITKKVKATGLDALFDATLKEMKEAGDKTIVFTNFVDFDSSWGHRRDIAGYAAGLELFDRRLPELMELVGEDDILILTADHGCDPSWTGTDHTREHIPVLIYGPKVKPGSLGHRETFADIGQTLATYFGTSPMDYGKNML

SEQ ID NO: 313 - protein, 1067 aa, Salmonella typhimurium
MKRMLINATQQEELRVALVDGQRLYDLDIESPGHEQKKANIYKGKITRIEPSLEAAFVDYGAERHGFLPLKEIAREYFPANYSAHGRPNIKDVLREGQEVIVQIDKEERGNKGAALTTFISLAGSYLVLMPNNPRAGGISRRIEGDDRTELKEALASLELPEGMGLIVRTAGVGKSAEALQWDLSFRLKHWEAIQKAAESRPAPFLIHQESNVIVRAFRDYLRQDIGEILIDNPKVMEMARQHIAALGRPDFSSKIKLYTGEIPLFSHYQIESQIESAFQREVRLPSGGSIVIDSTEALTAIDINSARATRGGDIEETAFNTNLEAADEIARQLRLRDLGGLIVIDFIDMTPVRHQRAVENRLREAVRQDRARIQISHISRFGLLEMSRQRLSPSLGESSHHVCPRCSGTGTVRDNESLSLSILRLIEEEALKENTQEVHAIVPVPIASYLLNEKRTAVNAIETRQDGVRCVIVPNDQMETPHYSVLRVRKGEETPTLSYMLPKLHEEAMALPSEEEYAERKRPEQPALATFAMPDVPPAPTPVEPAVSVATAKKDNVAAAQPAQPGLFSRFLNALKQLFSGEETKTVETAAPKAEEKAERQQDRRKPRQNNRRDRNERRDTRDNRAGRDGGESRDDNRRNRRQTQQQNAEARDTRQQETAEKVKTGDEQQQTPRRERSRRRNDDKRQAQQEVKALNREEQPVQETEQEERVQQVQPRRKQRQLNQKVRFTNSAVVETVDTPVVVDEPRPVENVEQPVPAPRTELAKVDLPVVADIAPEQDDSVEPRDNTGMPRRSRRSPRHLRVSGQRRRRYRDERYPTQSPMPLTVACASPEMASGKVWIRYPIVRPQETQVVDEQREADLALPQPVVAEQQVIAATAALEPQASVQAVENVAVEPQTVAEPQAPEVVEVETTHPEVIAAPVDEQPQLIAESDTPVAQEVIADAEPVAETADASITVAENVADVVVVEPEEETKAEAAVVEHTAEETVIAPAQVVEKSQDVVCVDDHNHASAPMTRAPAPEYVPETPHHSDWQRPSFHFEGKGAAGGHSATRHASAPATRPQPVE

SEQ ID NO: 314 - protein, 332 aa, Salmonella typhimurium
MKTLGEFIVEKQHEFSQATGELTALLSAIKLGAKIIHRDINKAGLVDILGASGAENVQGEVQQKLDLFANEKLKAALKARDIVAGIASEEEDEIVVFEGCEHAKYVVLMDPLDGSSNIDVNVSVGTIFSIYRRVTPVGTPVTEEDFLQPGNKQVAAGYVVYGSSTMLVYTTGCGVHAFTYDPSLGVFCLCQERMRFPEKGKTYSINEGNYIKFPNGVKKYIKFCQEEDSSTSRPYTSRYIGSLVADFHRNLLKGGIYLYPSTASHPQGKLRLLYECNPMAFLAEQAGGKASDGKERILDIIPESLHQRRSFFVGNRHMVDDVERFIREYPDA

SEQ ID NO: 315 - protein, 792 aa, Salmonella typhimurium
MSNNGSSPLVLWYNQLGMNDVDRVGGKNASLGEMITNLSGMGVSVPNGFATTADAFNQFLDQSGVNQRIYELLDKTDIDDVSQLAKAGAQIRQWIIDTPFQPELENAIRDAYAQLSSDDENASFAVRSSATAEDMPDASFAGQQETFLNVQGFDAVLVAVKHVFASLFNDRAISYRVHQGYDHRGVALSAGVQRMVRSDLASSGVMFSIDTESGFDQVVFITSAWGLGEMVVQGAVNPDEFYVHKPTLAAGRPAIVRRTMGSKKIRMVYAATQEHGKQVKIEDVPQEQRDIFSLTNEEVQELAKQAVQIEQHYGRPMDIEWAKDGHTGKLFIVQARPETVRSRGQVMERYTLHAQGKIIAEGRAIGHRIGAGTVKVIHDIGEMNRIEPGDVLVTDMTDPDWEPIMKKAAAIVTNRGGRTCHAAIIARELGIPAVVGCGDATERMKDGEKVTVSCAEGDTGYVYADMLDFSVKSSSVDTMPELPLKVMMNVGNPDRAFDFACLPNEGVGLARLEFIINRMIGVHPRALLEFDDQDAALQNDIREMMKGFDSPREFYVGRLTEGIATLGAAFYPKRVIVRLSDFKSNEYANLVGGERYEPHEENPMLGFRGAGRYVAESFRDCFALECEAVKRVRNDMGLTNVEIMIPFVRTVDQAKAVIEELARQGLKRGENGLKIIMMCEIPSNALLAEQFLEYFDGFSIGSNDMTQLALGLDRDSGVVSELFDERNDAVKALLSMAIRAAKKQGKYVGICGQGPSDHEDFAAWLMEEGIDSLSLNPDTVVQTWLSLAELKK

SEQ ID NO: 316 - protein, 127 aa, Salmonella typhimurium
MITGIQITKAANDDLLNSFWLLDSEKGEARCIVAKSGFAEDEVVAVSKLGEIEYREIPMEVKPEVRVEGGQHLNVNVLRRETLEDAVKHPEKYPQLTIRVSGYAVRFNSLTPEQQRDVIARTFTESL

SEQ ID NO: 317 - protein, 427 aa, Salmonella typhimurium
MTEAMKITLSTQPADARWGDKATYSINNDGITLHLNGKDDLGLIQRAARKIDGLGIKQVALTGEGWDTERCWAFWAGYKGPKGVRTVMWPDLDDAQRQELDNRLTIIDWVRDTINAPAEELGPEQLAQRAVDLLCSVACDSVTYRITKGEDLREQNYMGLHTVGRGSERPPVLLALDYNPTGDKDAPVYACLVGKGITFDSGGYSIKQSAFMDSMKSDMGGAATVTGALAFAITRGLNKRVKLFLCCADNLISGNAFKLGDIIRYRNGKNVEVMNTDAEGRLVLADGLIDASAQHPQLIIDMATLTGAAKTALGNDYHALFSFDDTLAGRLLTSAAQENEPFWRLPLAEFHRNQLPSNFAELNNTGSAAYPAGASTAAGFLSHFVENYREGWLHIDCSATYRKAPVEQWAAGATGLGVRTIANLLTA

SEQ ID NO: 318 - protein, 344 aa, Salmonella typhimurium
MAYSVQKSRLAKVAGVSLVLLLAACSSDSRYKRQVSGDESYLDAAPLAELHAPAGMILPITTGDYVIPVTKGSGAVGKALDIRPPAQPLALVSGARTQFSGDTATLLVENGRSSTLWPQVVSVIQAKNYPIEKRDDASQTLTTDWVNWNRLDEDEQYRGRYQISVKPQGYQQAVTVKLVNLEQAGKPVADAASLQRYSTEMMNVISAGLDKTATDAANAAQNRSAATMDVQSAADDTGLPMLVVRGPFNLVWQRLPAALEKVGMKVTDSTRSQGSMAVTYKPLSDSDWRDLGASDPGLASGDYKLQVGDLDNRSSLQFIDPKGHTLTQSQNDALVAVFQAAFNK

SEQ ID NO: 319 - protein, 271 aa, Salmonella typhimurium
KDTIALIVSTLNNPFFVSLKDGAQKEADKLGYNLVVLDSQNNPAKELANVQDLTVRGTKILLINPTDSDAVGNAVKMANQAKIPVITLDRQATKGDVVSHIASDNVLGGKIAGDYIAKKAGEGAKVIELQGIAGTSAARERGEGFQQAVAAHKFNVLASQPADFDRIKGLNVMQNLLTAHPDVQAVFAQNDEMALGALRALQTAGKADVMVVGFDGTPDGEKAVKDGKLAATIAQLPDQITAKGVETADKVLKGEKVQAKYPVDLKLVVKQ

SEQ ID NO: 320 - protein, 1752 aa, Salmonella typhimurium
MMSIAQVRSAGSAAGYYSDRDNYYVLGSMEERWAGKGAEQLGLQGTVDKEVFTRVLEGRLPDGADLSRQQDGGNKHRPGYDLTFSAPKSVSLMAMLAGDKRLTEAHNQAVDIAVRQVEALASTRVMTDGQSETVLTGNLVMALFNHDTSRDQEPQLHTHAVVVNVTQHDGEWKTLSSDKVGKTGFIENVYANQIAFGKIYRAVLKEKVEALGYETEVVGKHGMWEMPGVPVEAFSSRSQAIREAVGEDASLKSRDVAALDTRKSKQHVDPEVKMAEWMQTLKDTGFDISAYRESADRRAEIQAAQPVPSQEQPDIQQAVTQAIAGLSDRKVQFTYTDVLARTVGMLPPEAGVIEKARAGIDEAISREQLIPLDREKGLFTSGIHVLDELSVRALSSDIMKQNRVTVHPEKSVPRTGSYSDAVSVLAQDRPSLAIISGQGGAAGQRERVAELTMMAREQGREVQIIVADRRSQTNLKQDERLSGELITGRRQLQEGMLFSPGSTVIVDQGEKLSLKETLTLLDGAARHNVQVLITDSGQRTGTGSALMAMKEAGVNSYRWQGRQQTPATVISEPDRNVRYARLAGDFVAAVKAGEESVAQVSGMREQAILAGMIRSELKTQGILGQQDTMMTALSPVWLDSRNRYLRDMYREGMVMEQWNPEKRSHDRYVIDRVTAQSHSLTLRDAQGETQMVRISALDSSWSLFRPEKMPVADGERLMVTGKIPGLRVSVGDRLQVSAVNDGVMTVTVPGRAEPASLPVGDSPFTALKLENGWVETPGHSVSDSAKVFASVTQMAMDNATLNSLARSGRDVRLYSSLDETRTAEKLSRHPSFTVVSEQIKARAGEVSLETAISRQKAGLHTPAQQAIHLALPVVESKNLAFSQVDLLTEAKSFAAEGTGFADLGREIDAQIKRGDLLYVDVAKGYGTDLLISRASYDAEKSILHHILEGKEAVTPLMERVPGELMETLTSGQRAATRMILETKDRFTVVQGYAGVGKTTQFRAVMSAVNLLPESERPRVVGLGPTHRAVGEMRSAGVEAQTLASFLHDTQLQQRSGETPDFSNTLFLLDESSMVGNTDMARAYALIAAGGGRAVASGDTDQLQAIAPGQPFRLQQTRSAADVAIMKEIVRQTPELRDAVYSLINRDVNKALSGLENVKPVQVPRLKGAWAPENSVTEFSRLQERELAKAAQEAEKKGEAFPDVPVTLYEAIVRDYTGRTPEAREQTLIVTHLNEDRRVLNSMIQDALAKPGEQQVTVPVLTTANIRDGELRRLSTWEAHPGALALVDNVYHRIAGISKEDGLITLEDKAGNTRLISPREAAAEGVTLYNPETIRVGAGDRMRFTKSDRERGYVANSVWTVTAVSGDSVTLSDGKQTRVVRPGQDRAEQHIDLAYAITAHSAQGASETFAIALEGTEGGRKQMAGFESAYVALSRMKQHVQVYTDDRQGWVKAINSAEQKGTAHDVLEPKSEREMMNAERLFSTARELRDVAAGRAVLRNAGLAQGDSRARFIAPGRKYPQPYVALPAFDRNGKSAGIWLNPLTTDDGAGLRGFTGEGRVKGSEEAQFVALQGSRNGESLLAGSMQDGVRIARENPDSGVVVRIVGDGRPWNPVAITGGRVWGDIPDSNVQPGAGNGEPVTAEILAQRQAEEAVRRETERRADEIVRKMAEDKSDLPEEKTAQAVREIAGQEQDRMTPPEREPPLPESVLREPQRERETIREVARENRGRERLQQMEQEMVRDLQKEKTPGGD

SEQ ID NO: 321 - protein, 592 aa, Salmonella typhimurium
MRGKTVRRLAVLAAVGLLCHGAWAGTWNIGILAMRGEASTRSHWQPLAKTLSQQLPGETFHIQPLDLHQMQEAVNQGTVQFVITNPAQFVQLNSHAPLRWLASLRSTRDGKAVSNVIGSVILTRRDSGITTAHDLIGKTVGAIDAQAFGGYLLGYKALSDAGLRPERDFHLRFTGFPGDALVYMLREKAVQAAIVPVCLLENMDQEGLINKKDFIALLSRPTPLPCLTSTPLYPDWSFAALPAVSDALADRVTRALFNAPAAASFHWGAPASTSQVEALLRDVRQHPQQRRLWLDVKSWLIQHQLMVGGVILAFLLLTLNYIWVMLLVRRRGKQLERNSVVLHQHERALETARQMSVLGEMTSGFAHELNQPLSAIRHYAQGCLIRLRAADEQHPLLPALEQIDQQAQRGADTLRNLRHWVSQAQGNPVLTEAWKAIAIREAIDHVWQLLRMAQQFPTVTLHTEVSAALRVTLPSVLLEQVLANIILNAAQAGATHLWIVAERTENGISIVLQDNAGGIDEALLRQAFQPFMTTRKEGMGLGLAICQRLVRYGRGDISIRNQTAPDGLSGTVVTIHFLHENGGRDGDNSSTG

SEQ ID NO: 322 - protein, 474 aa, Salmonella typhimurium
MRIGMRLLLGYFLIVAVAAVFVLSIFVQEIKPGVRRATEGTLIDTATLLAALARDDLLSGNPTDGQLAKAFAQLQHRPFRANISGIVKVRNEYHIYMTDAQGKVLFDSENKAVGQDYSRWNDVWLTLRGQYGARSTAKDAADPNSTVMYVAAPIISDGRIIGVLTVGKPNAAMAPVIKRSERRILWASAVLLGIALAIGAGMVWWINRSIARLTRYADSVTENRPLALPALGSSELRKLAQALESMRIKLEGKNEIEQYVYALTHELKSPLAAIRGAAEILREGPPADVVTRFTENILAQNTRMQALVETLLRQARLENRQDIPLAPVAVDELFTQLSEARSIQLAAKKITLTLRPSSLVVVADAELLAQALGNVLDNAIDFTPENGVITLSAQPMGEKAILQVTDSGCGIPDFALPRIFDRFYSLPRENGRKSSGLGLAFVSEAARLLNGEVTLCNRPEGGVLASLTLHRHFT

SEQ ID NO: 323 - protein, 306 aa, Salmonella typhimurium
MSTLGHQYDNSLVSNAFGFLRLPMNFQPYDSDADWVITGVPFDMATSGRAGGRHGPAAIRQVSTNLAWEHHRFPWNFDMRERLNVVDCGDLVYAFGDAREMSEKLQAHAEKLLSAGKRMLSFGGDHFVTLPLLRAHAKHFGKMALVHFDAHTDTYANGCEFDHGTMFYTAPKEGLIDPHHSVQIGIRTEFDKDNGFTVLDACQVNDRGVDDILAQVKQIVGDMPVYLTFDIDCLDPAFAPGTGTPVIGGLTSDRAIKLVRGLKDLNIVGMDVVEVAPAYDQSEITALAAATLALEMLYIQAAKKGE

SEQ ID NO: 324 - protein, 485 aa, Salmonella typhimurium
MSELSQLSPQPLWDIFAKICSIPHPSYHEEQLAEHIVSWAKEKGLYVDRDQVGNILIRKPATAGMENRKPVVLQAHLDMVPQKNSDTVHDFTTDPIQPYIDGEWVKARGTTLGADNGIGMASALAVLADDNVVHGPLEVLLTMTEEAGMDGAFGLQSGWLQADILINTDSEEEGEIYMGCAGGIDFTSNLPLTREAVPAGFACFKLTLKGLKGGHSGGEIHLGLGNANKLLARFLAGHAEELDLRLIDFNGGTLRNAIPREAFATLAVAADNVGALKTLVNAYQDILKNELAEKEKNLTLQLNEVASDKAALTAPSRDTFVRLLNATPNGVIRNSDVAKGVVETSLNVGVVTMSDANVEIHCLIRSLIDSGKDYVVSMLDSLGKLAGAKTEAKGSYPGWQPDANSPVMHLVRETYQRLFNKTPNIQIIHAGLECGLFKKPYPDMDMVSIGPTITGPHSPDEQVHIESVGHYWTLLTELLKAIPAK

SEQ ID NO: 325 - protein, 928 aa, Salmonella typhimurium
MVQIPENPLILVDGSSYLYRAYHAFPPLTNSAGEPTGAMYGVLNMLRSLIMQYQPTHAAVVFDAKGKTFRDELFEHYKSHRPPMPDDLRAQIEPLHAMVKAMGLPLLAVSGVEADDVIGTLAREAEKVGRPVLISTGDKDMAQLVTPNITLINTMTNTILGPDEVVNKYGVPPELIIDFLALMGDSSDNIPGVPGVGEKTAQALLQGLGGLDTLYAEPEKIAGLTFRGAKTMAGKLAQNKDVAYLSYKLATIKTDVELELTCEQLEVQQPIADELLGLFKKYEFKRWTADVESGKWLQAKGAKPAAKPQETVVIDESPSEPAAALSYENYVTILDDVTLESWIEKLKKAPVFAFDTETDSLDNIAANLVGLSFAIEPGVAAYVPVAHDYLDAPDQISRQRALELLKPLLEDEKVRKVGQNLKYDRGVLQNYGIELRGIAFDTMLESYILNSVAGRHDMDSLSDRWLKHKTITFEDIAGKGKNQLTFNQIALEEAGRYAAEDADVTLQLHLKMWPELQQHKGPLNVFENIEMPLVPVLSRVERNGVKIDPAVLHKHSEEITLRLAELEKKAHDIAGEAFNLSSTKQLQTILFEKQGIKPLKKTPGGAPSTSEEVLEELALDYPLPKVILEYRGLAKLKSTYTDKLPLMINPKTGRVHTSYHQAVTATGRLSSTDPNLQNIPVRNEEGRRIRQAFIAPEDYLIVSADYSQIELRIMAHLSRDKGLLTAFAEGKDIHRATAAEVFGLPLDSVTGEQRRSAKAINFGLIYGMSAFGLSRQLNIPRKEAQKYMDLYFERYPGVLEYMERTRAQAKEQGYVETLEGRRLYLPDIKSSNAARRAGAERAAINAPMQGTAADIIKRAMIAVDAWLQAEQPRVRMIMQVHDELVFEVHKDDLDAVAKRIHQLMENCTRIDVPLLVEVGSGENWDQAH

SEQ ID NO: 326 - protein, 382 aa, Salmonella typhimurium
MKIVIAPDSFKESLSADKCCQAIKAGFSTVFPDARYVCLPIADGGEGTVDAMVAATGGKRVSVDVSGPMGEKVNGFYGLTGDGKTAIIEMAAASGLMLVAPEARNPLLASSFGTGELIRHALDAGIRHIILGIGGSATVDGGMGVAQALGVRFLDAQGTPLGAGGGNLSRLASIDLQGCDPRISECRIEVACDVDNPLVGPRGAAAVFGPQKGATPEMVETLENGLRNYARVLHALTGRDMSQIPGGGAAGGMGIAAIVFLEAEMKPGIEIVMQAVKLEEAVKEASLVITGEGRIDSQTAGGKAPIGVASVAKRHHVPVIGIAGVLGDGVEVVHRHGIDAVFSILPRLAPLPEVLANGEQNLYHSACNIARVIKLGQDIGTR

SEQ ID NO: 327 - protein, 92 aa, Salmonella typhimurium
MPRSLKKGPFIDLHLLKKVEKAVESGDKKPLRTWSRRSTIFPNMIGLTIAVHNGRQHVPVFVSDEMVGHKLGEFAPTRTYRGHAADKKAKKK

SEQ ID NO: 328 - protein, 423 aa, Salmonella typhimurium
  misc_feature (90)..(90): Xaa can be any naturally occurring amino acid
MTDKRKDGSGKLLYCSFCGKSQHEVRKLIAGPSVYICDECVDLCNDIIREEIKEVAPHRERSALPTPHEIRTHLDDYVIGQEQAKKVLAXAVYNHYKRLRNGDTSNGVELGKSNILLIGPTGSGKTLLAETLARLLDVPFTMADATTLTEAGYVGEDVENIIQKLLQKCDYDVQKAQRGIVYIDEIDKISRKSDNPSITRDVSGEGVQQALLKLIEGTVAAVPPQGGRKHPQQEFLQVDTSKILFICGGAFAGLDKVIANRVETGSGIGFGATVKAKSDKASEGELLSQVEPEDLIKFGLIPEFIGRLPVVATLNELSEEALIQILKEPKNALTKQYQALFNLEGVDLEFRDEALDAIARKAMARKTGARGLRSIVEAALLDTMYDLPSMEDVEKVVIDESVIAGQSKPLLIYGKPEAQASGE

SEQ ID NO: 329 - protein, 431 aa, Salmonella typhimurium
MVSLEKNDRVMLARQLPLKSVALILAGGRGTRLKDLTNKRAKPAVHFGGKFRIIDFALSNCLNSGIRRIGVITQYQSHTLVQHIQRGWSLFSEEMNEFVDLLPAQQRMKGENWYRGTADAVTQNLDIIRRYKAEYVVILAGDHIYKQDYSRMLIDHVEKGARCTVACMPVPIKEATAFGVMAVDESDKIIDFVEKPANPPAMPGDASKSLASMGIYVFDADYLYELLAADDKDDASSHDFGKDIIPKITREGMAYAHPFPLSCVQSDPQAEPYWRDVGTLEAYWKANLDLASVTPELDMYDQNWPIRTHMESLPPAKFVQDRSGSHGMTLNSLVSGGCIISGSVVVQSVLFPRVRINSFCNIDSAVLLPEVWVGRSCRLRRCVIDRACIIPEGMVIGENAEEDARRFYRSEEGIVLVTREMLRKLQVKQER

SEQ ID NO: 330 - protein, 514 aa, Salmonella typhimurium
MSVSKKPMVLVILDGYGYREEQQDNAILNAKTPVMDALWAKRPHTLIDASGLEVGLPDRQMGNSEVGHVNLGAGRIVYQDLTRLDVEIKERTFFANPVLTNAVDQAKNAGKAVHIMGLLSAGGVHSHEDHIMAMVELAAERGAEKIYLHAFLDGRDTPPRSAEASLKKFEDKFAALGKGRVASIVGRYYAMDRDNRWDRVEKAYDLMTLAQGEFQADTAVAGLQAAYARDENDEFVKATVIRAEGQADAAMEDGDTLIFMNFRADRAREITRAFVNADFDGFARKKVVNLNFVMLTEYAADIKTAVAYPPASLANTFGEWMAKNDKTQLRISETEKYAHVTFFFNGGVEEPFAGEERILINSPKVATYDLQPEMSSAELTEKLVAAIESGKYDTIICNYPNGDMVGHTGVMEAAIKAVEALDNCIEQVTKAVESVGGQLLITADHGNAEQMRDPATGQAHTAHTNLPVPLIYVGEKNVKAVEGGKLSDIAPTMLSLMGMEIPQEMTGKPLFIVE

SEQ ID NO: 331 - protein, 400 aa, Salmonella typhimurium
MSSKLVLVLNCGSSSLKFAIIDAVNGDEYLSGLAECFHLPEARIKWKMDGSKQEAALGAGAAHSEALNFIVNTILAQKPELSAQLTAIGHRIVHGGEKYTSSVVIDESVIQGIKDSASFAPLHNPAHLIGIAEALKSFPQLKDKNVAVFDTAFHQTMPEESYLYALPYSLYKEHGVRRYGAHGTSHFYVTQEAAKMLNKPVEELNIITCHLGNGGSVSAIRNGKCVDTSMGLTPLEGLVMGTRSGDIDPAIIFHLHDTLGMSVDQINKMLTKESGLLGLTEVTSDCRYVEDNYATKEDAKRAMDVYCHRLAKYIGSYTALMDGRLDAVVFTGGIGENAAMVRELSLGKLGVLGFEVDHERNLAARFGKSGFINKEGTRPAVVIPTNEELVIAQDASRLTA

SEQ ID NO: 332 - protein, 268 aa, Salmonella typhimurium
MVETLLEVRNLSKTFRYRTGWFRRQTVDAVKPLSFTLRERQTLAIIGENGSGKSTLAKMLAGMIEPTSGELLIDDHPLHYGDYSFRSQRIRMIFQDPSTSLNPRQRISQILDFPLRLNTDLEPEQRRKQIVETMRMVGLLPDHVSYYPHMLAPGQKQRLGLARALILRPKVIIADEALASLDMSMRSQLINLMLELQEKQGISYIYVTQHIGMMKHISDQVLVMHQGEVVERGSTADVLASPLHELTRRLIAGHFGEALTADAWRKDR

SEQ ID NO: 333 - protein, 682 aa, Salmonella typhimurium
MSRKQLALFEPVLLVQALTDAVKKLSPRAQWRNPVMFVVWAGSVLTTLLTLAMVTGQIAGSALFTGIISLWLWFTVLFANFAEALAEGRSKAQANSLKGVKKTAFARRLRAPRHDAQADNVPAAELRKGDIVLVKAGDIIPCDGEVIEGGASVDESAITGESAPVIRESGGDFASVTGGTRILSDWLVIACSVNPGETFLDRMIAMVEGAQRRKTPNEIALTILLIALTIVFLLATATLWPFSAWGGNAVSVTVLVALLVCLIPTTIGGLLSAIGVAGMSRMLGANVIATSGRAVEAAGDVDVLLLDKTGTITLGNRQASDFIPARGVDERTLADAAQLASLADETPEGRSIVILAKQRFNLRERDVQSLHATFVPFTAQSRMSGINIDNRMIRKGSVDAIRRHVESNGGHFPADVEQNVENVARLGATPLVVVEGAHVLGVIALKDIVKGGIKERFAQLRKMGIKTVMITGDNRLTAAAIAAEAGVDDFLAEATPEAKLALIRQYQAEGRLVAMTGDGTNDAPALAQADVAVAMNSGTQAAKEAGNMVDLDSNPTKLIEVVHIGKQMLMTRGSLTTFSIANDVAKYFAIIPAAFAATYPQLNALNVMGLHSPNSAILSAVIFNALIIIFLIPLALKGVSYKPLSASAMLRRNLWIYGLGGLVVPFIGIKVIDVLLTLLGLA

SEQ ID NO: 334 - protein, 432 aa, Salmonella typhimurium
MGNNVVVLGTQWGDEGKGKIVDLLTERAKYVVRYQGGHNAGHTLVINGEKTVLHLIPSGILRENVTSIIGNGVVLSPSALMKEMKELEDRGIPVRERLLLSEACPLILDYHVALDNAREKARGAKAIGTTGRGIGPAYEDKVARRGLRVGDLFDKETFAEKLKEVMEYHNFQLVNYYKAEAVDYQKVLDDTMAVADILTSMVVDVSDLLDQARQRGDFVMFEGAQGTLLDIDHGTYPYVTSSNTTAGGVATGSGLGPRYVDYVLGILKAYSTRVGAGPFPTELFDETGEFLCKQGNEYGATTGRRRRTGWLDTVAVRRAVQLNSLSGFCLTKLDVLDGLKEVKLCVAYRMPDGREVTTTPLAADDWKGVEPIYETMPGWSESTFGVKDRSGLPQAALNYIKRIEELTGVPIDIISTGPDRTETMILRDPFDA

SEQ ID NO: 335 - protein, 347 aa, Salmonella typhimurium
MRYRVILFCLFGLLPVQLLWAAPAQRTFSDWQVTCNNQNFCVARNTGEHHGLVMTLSRSAGARTDAVLRIDRGGLAPPDAKEAAIAPRLLLDGKPLSFNSPHWRVSPWHLMTGDPATITAFLQTIQDAQAITLKNGVQTLSLAGLKAALLFIDAQQKRVGSETAWIEKGNEPPLSVPPAPALKGIAVINPTPVPLSEEERDDLLDYAAWRVNGIRCSLDPLRRETQVSALTDDKALLIVNCEAGAYNTIDLAWVVSRKKTLVSRAVRLRLPFNRGVESNDMELMNVFFDEKTRELVTLAKGRGLTDCGIQTRWRYDGDRFRLVRYAEEPSCDSWHGPDAWPTLWITR

SEQ ID NO: 336 - protein, 177 aa, Salmonella typhimurium
MSEFVTVARPYAKAAFDFAVEHQSVERWQDMLAFAAEVTKNEQMAELLSGALAPETLAESFIAVCGEQLDENGQNLIRVMAENNRLNALPDVLEQFIHLRAASEATSEVEVTSATALSEEQLSKISAAMEKRLSRKVKLNCKIDKSVMAGVIIRAGDMVIDGSVRGRLERLADVLQS

SEQ ID NO: 337 - protein, 367 aa, Salmonella typhimurium
MDRIIQSPGKYIQGANVIARLGDYLKPMANNWLVVGDKFVLGFAEETLRKSLTDAGLSVEIAPFGGECSQNEIDRLRAVAEKSQCGAVLGIGGGKTLDTAKALAHFMNVPVAIAPTIASTDAPCSALSVIYTDAGEFDRYLLLPHNPNMVIVDTQIVAGAPARLLAAGIGDALATWFEARACSRSGATTMAGGKCTQAALALAELCYNTLIEEGEKAMLAAEQHVVTPALERVIEANTYLSGVGFESGGLAAAHAIHNGLTAIPDAHHYYHGEKVAFGTLTQLVLENAPVEEIETVAALCHSVGLPITLAQLDIKQDIPAKMRTVAEASCAEGETIHNMPGGATPDEVYAALLVADQYGQRFLQEWE

SEQ ID NO: 338 - protein, 488 aa, Salmonella typhimurium
MLRIAKEALTFDDVLLVPAHSTVLPNTADLSTQLTKTIRLNIPMLSAAMDTVTEARLAIALAQEGGIGFIHKNMSIERQAEEVRRVKKHESGVVTDPQTVLPTTTLHEVKALTERNGFAGYPVVTEDNELVGIITGRDVRFVTDLNQPVSVYMTPKERLVTVREGEAREVVLAKMHEKRVEKALVVDDNFHLLGMITVKDFQKAERKPNSCKDEQGRLRVGAAVGAGAGNEERVDALVAAGVDVLLIDSSHGHSEGVLQRIRETRAKYPDLQIIGGNVATGAGARALAEAGCSAVKVGIGPGSICTTRIVTGVGVPQITAVSDAVEALEGTGIPVIADGGIRFSGDIAKAIAAGASAVMVGSMLAGTEESPGEIELYQGRSYKSYRGMGSLGAMSKGSSDRYFQSDNAADKLVPEGIEGRVAYKGRLKEIIHQQMGGLRSCMGLTGCATIDELRTKAEFVRISGAGIQESHVHDVTITKESPNYRLGS

SEQ ID NO: 339 - protein, 239 aa, Salmonella typhimurium
MMKLEFSIYRYNPDVDNAPRMQDYTLEGEEGRDMMLLDALIQLKEKDPSLSFRRSCREGVCGSDGLNMNGKNGLACITPISALTQPGKKIVIRPLPGLPVIRDLVVDMGQFYAQYEKIKPYLLNNGQNPPAREHLQMPEQREKLDGLYECILCACCSTSCPSFWWNPDKFIGPAGLLAAYRFLIDSRDTETDSRLEGMSDAFSVFRCHSIMNCVSVCPKGLNPTRAIGHIKSMLLQRSA

SEQ ID NO: 340 - protein, 220 aa, Salmonella typhimurium
MLPATFLISDEGKIMATPTFDTIEAQASYGIGLQVGQQLSESGLEGLLPEALVAGIADALEGKHPAVPVDVVHRALREIHERADAVRRERFKAMAAEGVKYLEENREKDGVNSTESGLQFRVLTQGEGAIPARTDRVRVHYTGKLIDGTVFDSSVARGEPAEFPVNGVIAGWIEALTLMPVGSKWELTIPQELAYGERGAGASIPPFSTLVFEVELLEIL

SEQ ID NO: 341 - protein, 112 aa, Salmonella typhimurium
MTMNITSKQMEITPAIRQHVADRLAKLEKWQTHLINPHIILSKEPQGFIADATINTPNGHLVASAKHEDMYTAINELINKLERQLNKVQHKGEARRATASVKDASFVEAEEE

SEQ ID NO: 342 - protein, 636 aa, Salmonella typhimurium
MTDDFAADGQLAKAITGFKPREPQRQMAVAVTQAIENAQPLVVEAGTGTGKTYAYLAPALRAGKKVIISTGSKALQDQLYSRDLPTVAKALAFTGKTALLKGRSNYLCLERLEQQALAGGDLPVQTLSDVILLRSWSNQTRDGDISTCVSVAEDSQAWPLVTSTNDNCLGSDCPLYKECFVVKARKKAMDADVVIVNHHLFLADMVVKESGFGELIPQAEVMIFDEAHQLPDIASQYFGQSLSSRQLLDLAKDITIAYRTELKDTQQLQKCADRLAQSAQDFRLQLGEPGYRGNLRELLADSRIQRAFLLLDDTLELCYDVAKLSLGRSALLDAAFERATLYRSRLKRLKEINQPGYSYWYECTSRHFTLALTPLTVADKFKEVMEQKPGSWIFTSATLSVNDDLHHFTARLGIEQAESMLLPSPFDYTRQALLCVPRNLPQTNQPGAARQLAAMLRPIIEANNGRCFMLCTSHAMMRDLAEQFRATMTLPVLLQGETSKGQLLQQFVSAGNALLVATSSFWEGVDVRGDTLSLVIIDKLPFTSPDDPLLKARMEDCRLRGGDPFDEVQLPDAVITLKQGVGRLIRDADDRGVLVICDNRLVMRPYGATFLASLPPAPRTRDIARAVRFLAIPSAE

SEQ ID NO: 343 - protein, 139 aa, Salmonella typhimurium
MAMTYHLDVVSAEQQMFSGLVEKIQVTGSEGELGIYPGHAPLLTAIKPGMIRIVKQHGHEEFIYLSGGILEVQPGSVTVLADTAIRGQDLDEARALEAKRKAEEHIKSSHGDVDYAQASAELAKAIAKLRVIELTKKAM

SEQ ID NO: 344 - protein, 94 aa, Salmonella typhimurium
MSKCSADETPVCCCMDVGTIMDNSDCTASYSRVFATRAEAEETLAALTEKARSVESEPCQITPTFTEESEGVRLDIDFVFACEAETLIFQLGLR

SEQ ID NO: 345 - protein, 80 aa, Salmonella typhimurium
MATPWSGYLDDVSAKFDTGVDNLQTQVTEALDKLAAKPSDPALLAAYQSKLSEYNLYRNAQSNTVKVFKDIDAAIIQNFR

SEQ ID NO: 346 - protein, 663 aa, Salmonella typhimurium
MFGKLSLDAVPFHEPIVMVTIAAIIVGGLAILAAITYFGKWTYLWKEWLTSVDHKRLGIMYIIVAIVMLLRGFADAIMMRSQQALASAGEAGFLPPHHYDQIFTAHGVIMIFFVAMPFVIGLMNLVVPLQIGARDVAFPFLNNLSFWFTVVGVILVNLSLGVGEFAQTGWLAYPPLSGIEYSPSVGVDYWIWALQLSGIGTTLTGINFFVTILKMRAPGMTMFKMPVFTWASLCANVLIIASFPILTVTVALLTLDRYLGTHFFTNDMGGNMMMYINLIWAWGHPEVYILILPVFGVFSEIAATFSRKRLFGYTSLVWATVCITVLSFIVWLHHFFTMGAGANVNAFFGITTMIIAIPTGVKIFNWLFTMYQGRIVFHSAMMWTIGFIVTFSVGGMTGVLLAVPGADFVLHNSLFLIAHFHNVIIGGVVFGCFAGMTYWWPKAFGFKLNETWGKRAFWFWIIGFFVAFMPLYVLGFMGMTRRLSQQIDPQFHTMLMVAAAGAALIALGILCQLIQIFVSIRDRDQNRDLTGDPWGGRTLEWSTSSPPPFYNFAVVPHVHERDAFWEMKEKGEAYQQPGQYEEIHMPKNSGAGIVIAAFATVFGFAMIWHIWWLAIVGFAGMIISWIVKSFDEDVDYYVPVPEVEKLENQHFDEITKAGLKNGN

SEQ ID NO: 347 - protein, 569 aa, Salmonella typhimurium
MSEEKLGQQYLAALHQAFPGVVLDEAWQTKDQLTITVKVNYLPEVVEFLYYQQGGWLSVLFGNDERQLCGHYAVYYVLSMEQGTKCWITVRVEVDANKLEFPSVTPRVPAAVWGEREVRDMYGLIPVGLPDERRLVLPDDWPDELYPLRKDSMDYRQRPAPTTDAETYEFINELGDKKNNVVPIGPLHVTSDEPGHFRLFVDGENIIDADYRLFYVHRGMEKLAETRMGYNEVTFLSDRVCGICGFAHSTAYTTSVENAMGIQVPERAQMIRAILLEVERLHSHLLNLGLACHFTGFDSGFMQFFRVRETSMKMAEILTGARKTYGLNLIGGIRRDLLKEDMIQTRQLAQQMRRDVQELVDMLLSTPNMEQRTVGIGRLDPEIARDFSNVGPMVRASGHARDTRADHPFVGYGLLPMEVHSEQGCDVISRLKVRINEVYTSLNMIDFGLDNLPGGPLMVEGFTYIPHRFALGFAEAPRGDDIHWSMTGDNQKLYRWRCRAATYANWPTLRYMLRGNTVSDAPLIIGSLDPCYSCTDRMTVVDVRKKKSKVVPYKELERYSIERKNSPLK

SEQ ID NO: 348 - protein, 322 aa, Salmonella typhimurium
MTIAIVIGTHGWAAEQLLKTAEMLLGEQENVGWIDFVPGENAETLIEKYNAQLAKLDTSKGVLFLVDTWGGSPFNAASRIVVDKERYEVIAGVNIPMLVETFMARDDDPSFDELVALAVETGREGVKALKAKPVEKAAPAPVAAAPKAAAPAKPMGPNDYMVIGLARIDDRLIHGQVATRWTKETNVSRIIVVSDEVAADTVRKTLLTQVAPPGVTAHVVDVAKMIRVYNNPKYAGERVMLLFTNPTDVERIVEGGVKVTSVNIGGMAYRQGKTQVNNAVSVDEKDIEAFKKLNERGIELEVRKVSTDPKLKMMDLIAKVAK

SEQ ID NO: 349 - protein, 131 aa, Salmonella typhimurium
MRHYEIVFMVHPDQSEQVPGMIERYSAAITGAEGKIHRLEDWGRRQLAYPINKLHKAHYVLMNVEAPQEVIDELETTFRFNDAVIRSMVMRTKHAVTEASPMVKAKDERRERRDDFANETADDAEAGDSEE

SEQ ID NO: 350 - protein, 596 aa, Salmonella typhimurium
MQTFQADLAIIGAGGAGLRAAIAAAQANPNAKIALISKVYPMRSHTVAAEGGSAAVAQDHDSFDYHFHDTVAGGDWLCEQDVVDYFVHHCPTEMTQLEQWGCPWSRRPDGSVNVRRFGGMKIERTWFAADKTGFHMLHTLFQTSLQFPQIQRFDEHFVLDILVDDNHARGLVAMNMMEGTLVQIRANAVVMATGGAGRVYRYNTNGGIVTGDGMGMALSHGVPLRDMEFVQYHPTGLPGSGILMTEGCRGEGGILVNKNGYRYLQDYGMGPETPLGEPKNKYMELGPRDKVSQAFWHEWRKGNTISTPRGDVVHLDLRHLGEKKLHERLPFICELAKAYVGVDPVKEPIPVRPTAHYTMGGIETDQNCESRVKGLFAVGECSSVGLHGANRLGSNSLAELVVFGRLAGEQAMERAATAGAANSAALDAQVADIEQRLKNLVNQEGNENWSKIRDEMGLSMEEGCGIYRTPELMQKTVDKLAELQERFKRVRISDTSSVFNTDLLYTIELGHGLNVAECMAHSALARKESRGAHQRLDEGCTERDDVNFLKHTLAFRDADGTTRLEYSDVKITTLPPAKRVYGGEAEAADKKEKANG

SEQ ID NO: 351 - protein, 110 aa, Salmonella typhimurium
MKKILLIASMTAGLTACASSPAPEEDSRLKEAYSACINTAQGSPEKIEACQSVLNVLKKERRHQQFANEESVRVLDYQQCIQATRTGNDQAVKADCDKVWQEIRSHNNVQ

SEQ ID NO: 352 - protein, 535 aa, Salmonella typhimurium
MSISLKKSGMLKLGLSLVAMTVAASVQAKTLVYCSEGSPEGFNPQLFTSGTTYDASSVPIYNRLVEFKTGTTEVIPGLAEKWDISEDGKTYTFHLRKGVKWQSSKDFKPTRELNADDVVFSFDRQKNEQNPYHKVSGGSYEYFEGMGLPDLISEVKKVDDHTVQFVLTRPEAPFLADLAMDFASILSKEYADNMLKAGTPEKVDLNPVGTGPFQLVQYQKDSRILYKAFDGYWGTKPQIDRLVFSITPDASVRYAKLQKNECQVMPYPNPADIARMKEDKNINLMEQAGLNVGYLSYNVQKKPLDDVKVRQALTYAVNKEAIIKAVYQGAGVAAKNLIPPTMWGYNDDIKDYGYDPEKAKALLKEAGLEKGFTIDLWAMPVQRPYNPNARRMAEMIQADWAKIGVQAKIVTYEWGEYLKRAKDGEHQTVMMGWTGDNGDPDNFFATLFSCDAAQQGSNYSKWCYKPFEDLIQPARATDDHNKRIELYKQAQVVMHDQAPALIIAHSTVYEPVRKEVKGYVVDPLGKHHFENVSVE

SEQ ID NO: 353 - protein, 495 aa, Salmonella typhimurium [sequence omitted]

SEQ ID NO: 354 - protein, 419 aa, Salmonella typhimurium
MNLTELKNTPVSELITLGESMGLENLARMRKQDIIFAILKQHAKSGEDIFGDGVLEILQDGFGFLRSADSSYLAGPDDIYVSPSQIRRFNLRTGDTISGKIRPPKEGERYFALLKVNEVNYDKPENARNKILFENLTPLHANSRLRMERGNGSTEDLTARVLDLASPIGRGQRGLIVAPPKAGKTMLLQNIAQSIAYNHPDCVLMVLLIDERPEEVTEMQRLVKGEVVASTFDEPASRHVQVAEMVIEKAKRLVEHKKDVIILLDSITRLARAYNTVVPASGKVLTGGVDANALHRPKRFFGAARNVEEGGSLTIIATALIDTGSKMDEVIYEEFKGTGNMELHLSRKIAEKRVFPAIDYNRSGTRKEELLTTQEELQKMWILRKIIHPMGEIDAMEFLINKLAMTKTNDDFFEMMKRS

SEQ ID NO: 355 - protein, 406 aa, Salmonella typhimurium
MEKHFVGSEIGQLRSVMLHRPNLSLKRLTPSNCQELLFDDVLSVERAGEEHDIFANTLRQQGIEVLLLTDLLTQTLDVADAKAWLLDTQISDYRLGPTFAADIRAWLADMPHRELARHLSGGLTYGEIPASIKNMVVDTHDINDFIMKPLPNHLFTRDTSCWIYNGVSINPMAKPARQRETNNLRAIYRWHPQFAGGDFIKYFGDEDINYDHATLEGGDVLVIGRGAVLIGMSERTTPQGVEFLAQALFKHRQAERVIAVELPKHRSCMHLDTVMTHIDIDTFSVYPEVVRPDVQCWTLTPDGRGGLKRTQESTLVHALETALGIDQVRLITTGGDAFEAEREQWNDANNVLTLRPGVVVGYERNIWTNEKYDKAGITVLPIPGDELGRGRGGARCMSCPLERDGI

SEQ ID NO: 356 - protein, 609 aa, Salmonella typhimurium
MCGIVGAIAQRDVAEILLEGLRRLEYRGYDSAGLAVVDAEGHMTRLRRLGKVQMLAQAAEEHPLHGGTGIAHTRWATHGEPSEANAHPHVSEHIVVVHNGIIENHEPLREALKARGYTFVSETDTEVIAHLVNWELKQGGTLREAVLRAIPQLRGAYGTVIMDTRHPDTLLAARSGSPLVIGLGMGENFIASDQLALLPVTRRFIFLEEGDIAEITRRSVNIFDNTGAEVKRQDIESNLQYDAGDKGIYRHYMQKEIYEQPNAIKNTLTGRISHGQVDLSELGPNADELLSKVEHIQILACGTSYNSGMVSRYWFESLAGIPCDVEIASEFRYRKSAVRRNSLMITLSQSGETADTLAGLRLSKELGYLGSLAICNVPGSSLVRESDLALMTNAGTEIGVASTKAFTTQLTVLLMLVAKLSRLKGLDASIEHDIVHGLQALPSRIEQMLSQDKRIELLAEDFSDKHHALFLGRGDQYPIALEGALKLKEISYIHAEAYAAGELKHGPLALIDADMPVIVVAPNNELLEKLKSNIEEVRARGGQLYVFADQDAGFVSNDNMHIIEMPHVEEVIAPIFYTVPLQLLAYHVALIKGTDVDQPRNLAKSVTVE

SEQ ID NO: 357 - protein, 1020 aa, Salmonella typhimurium
MANLTRRQWLKVGLAVGGMVTFGLSYRDVAKRAIDGLLNGTSGKVTRDRIFGNALIPEAQAQTHWQQNPQQTIAMTQCFGCWTQCGIRARVNADGKVIRIAGNPYHPLSQEHPIDSSVPFSEAMEQLAGESGLDARSTACARGATLLESLYSPLRLLEPMKRVGKRGEGKWQRISFEQLIEEVVEGGDLFGEGHVDGLRAIHAPDTPIDAKHPSFGPKTNQLLVTNTSDEGRDAFLRRFALNSFGSKNFGAHGAYCGLAYRAGSGALMGDLDKNPHVKPDWENVEFALFMGTSPAQSGNPFKRQARQLASARLRENFQYVVVAPALPLSTVLADPRGRWQPVMPGSDSALAMGMIRWIMDNQRYNADYLAIPGVQAMQQAGEQSWTNATHLVIADELPTLAGQHLTLRHLTPDGEETPVVLNTDGELVDASTCRQARLFVTQYVTLADGQRVTVKSGLQRLKEAAEKLSLAQYSEQCGVPEAQIIALAETFTSHGRKAAVISHGGMMAGNGFYNAWSVMMLNALIGNLSLSGGVFVGGGKFNGVSDGPRYNMNSFAGKVKPSGLSIARSKTAYEASEEYRDKIAGGQSPYPAKAPWYPFVAGQLTELLTSALEGYPYPLKAWISNMSNPFYGVPGLRAVAEEKLKDPRRLPLFIAIDAFMNETTALADYIVPDTHNFESWGFTAPWGGVASKATTARWPVVAPATHRTADGQPVSMEAFCIAVAKRLHLPGFGDRAITDPQGNTFPLNRAEDFYLRVAANIAFMGKTPVALANQEDISLTGVSRILPAIQHTLKADEVGRVAFIYSRGGRFAPEDSGYTEQRLGNAWKKPLQIWNADVAAHRHAITGERFSGCPVWYPARLSDGRAIDDQFPIGQWPLKLISFKSNTMSSSTAVIPRLHHVKPANLVALNPQDGERYGLQHGDRVRIITPGGQVVAQISLLNGVMPGVIAIEHGYGHREMGATQHSLDGVPMPYDPQIRAGINLNDLGFADPTRTITNTWLDWVSGAAVRQGLPAKIERI

SEQ ID NO: 358 - protein, 253 aa, Salmonella typhimurium
MSKSDVFHLGLTKNDLQGAQLAIVPGDPERVEKIAALMDKPVKLASHREFTSWRAELDGKAVIVCSTGIGGPSTSIAVEELAQLGIRTFLRIGTTGAIQPHINVGDVLVTTASVRLDGASLHFAPMEFPAVADFACTTALVEAAKSIGATTHVGVTASSDTFYPGQERYDTYSGRVVRRFKGSMEEWQAMGVMNYEMESATLLTMCASQGLRAGMVAGVIVNRTQQEIPNAETMKQTESHAVKIVVEAARRLL

SEQ ID NO: 359 - protein, 164 aa, Salmonella typhimurium
MKMFVPAVVFAALASASAWANNGDTAQPLEKIAPYPQAEKGMKRQVITLTPQQDESTLKVELLIGQTLNVDCNQHRLGGTLETKTLEGWGYDYYVFDNVTSPVSTMMACPEGKKEQKFVTAWLGEDGMLRYNSKLPIVVYTPANVDVKYRIWKADANVQNAVAR

SEQ ID NO: 360 - protein, 205 aa, Salmonella typhimurium
MTTQYGFFIDSSRCTGCKTCELACKDYKDLTPDVSFRRIYEYAGGDWQEDNGVWHQNVFAYYLSISCNHCEDPACTKVCPSGAMHKRDDGFVVVNEEVCIGCRYCHMACPYGAPQYNAAKGHMTKCDGCYDRVAEGKKPICVESCPLRALDFGPIDELRKKHGELAAVAPLPRAHFTKPNIVIKPNANSRPTGDTTGYLANPKEV

SEQ ID NO: 361 - protein, 455 aa, Salmonella typhimurium
MKKHTQLLSALALSVGLTLSAPFPALASIPGQVPGQATLPSLAPMLEKVLPAVVSVKVEGTAAQSQKVPEEFKKFFGEDLPDQPSQPFEGLGSGVIIDAAKGYVLTNNHVINQAQKISIQLNDGREFDAKQIGGDDQSDIALLQIQNPSKLTQIAIADSDKLRVGDFAVAVGNPFGLGQTATSGIISALGRSGLNLEGLENFIQTDASINRGNSGGALLNLNGELIGINTAILAPGGGSIGIGFAIPSNMAQTLAQQLIQFGEIKRGLLGIKGTEMTADIAKAFKLNVQRGAFVSEVLPNSGSAKAGVKSGDVIISLNGKQLNSFAELRSRIATTEPGTKVKLGLLRDGKPLEVEVTLDSNTSSSASAEMIAPALQGATLSDGQLKDGTKGVKVDSVEKSSPAAQAGLQKDDVIIGVNRDRISSIAEMRKVMAAKPSIIALQVVRGNENIYLLLR

SEQ ID NO: 362 - protein, 291 aa, Salmonella typhimurium
MADLDDIKDGKDFHTDKPQTNTLFALKGCGALDWGMQSRLARIFNPKTRKTVMLAFDHGYFQGPTTGLERIDINIAPLFEYADVLMCTRGILRSVVPPAINKPVVLRASGANSILTELSNEAVAVAMDDAVRLNSCAAAAQVYIGSEHEHQSIKNIIQLIDAGLRVGMPIMAVTGVGKDMARDQRYFSLATRIAAEMGAQIIKTYYVDKGFERIAAGCPVPIVIAGGKKLPEREALEMCYQAIDQGASGVDMGRNIFQSEDPVAMIKAVHAVVHHNETAERAYELFLSEKS

SEQ ID NO: 363 - protein, 445 aa, Salmonella typhimurium
MKNVIRTPETHPLTWRLRDDKQPVWLDEYRSKNGYEGARKALTGLSPDEIVSQVKDAGLKGRGGAGFSTGLKWSLMPKDESMNIRYLLCNADEMEPGTYKDRLLMEQLPHLLVEGMLISAFALKAYRGYIFLRGEYIEAAVHLRRAIAEATEAGLLGKNIMGTGFDFELFVHTGAGRYICGEETALINSLEGRRANPRSKPPFPATSGVWGKPTCVNNVETLCNVPAILANGVEWYQNISKSKDAGTKLMGFSGRVKNPGLWELPFGTTAREILEDYAGGMRDGLKFKAWQPGGAGTDFLTEAHLDLPMEFESIGKAGSRLGTALAMAVDHEIGMVSLVRNLEEFFARESCGWCTPCRDGLPWSVKILRALERGEGQPGDIETLEQLCRFLGPGKTFCAHAPGAVEPLQSAIKYFREEFEAGIKQPFSNTHLINGIQPNLLKERW

SEQ ID NO: 364 - protein, 112 aa, Salmonella typhimurium
MRCKTLTAAAAVLLMLTAGCSTLERVVYRPDINQGNYLTPTDVAKVRVGMTQQQVAYALGTPMMTDPFGTNTWFYVFRQQPGHENVTQQTLTLTFNSSGVLTNIDNKPALTK

SEQ ID NO: 365 - protein, 176 aa, Salmonella typhimurium
MASRGVNKVILVGNLGQDPEVRYMPSGGAVANLTLATSESWRDKQTGEMKEQTEWHRVVMFGKLAEVAGEYLRKGSQVYIEGQLRTRKWTDQSGQERYTTEINVPQIGGVMQMLGGRQGGGAPAGGQQQGGWGQPQQPQQPQGGNQFSGGAQSRPQQSAPAPSNEPPMDFDDDIPF

SEQ ID NO: 366 - protein, 467 aa, Salmonella typhimurium
MNQQDIEQVVKAVLLKMKDSSQPASTVHEMGVFASLDDAVAAAKRAQQGLKSVAMRQLAIHAIREAGEKHARELAELAVSETGMGRVDDKFAKNVAQARGTPGVECLSPQVLTGDNGLTLIENAPWGVVASVTPSTNPAATVINNAISLIAAGNSVVFAPHPAAKKVSQRAITLLNQAVVAAGGPENLLVTVANPDIETAQRLFKYPGIGLLVVTGGERVVDAARKHTNKRLIAAGAGNPPVVVDETADLPRAAQSIVKGASFDNNIICADEKVLIVVDSVADELMRLMEGQHAVKLTAAQAEQLQPVLLKNIDERGKGTVSRDWVGRDAGKIAAAIGLNVPDQTRLLFVETPANHPFAVTEMMMPVLPVVRVANVEEAIALAVQLEGGCHHTAAMHSRNIDNMNQMANAIDTSIFVKNGPCIAGLGLGGEGWTTMTITTPTGEGVTSARTFVRLRRCVLVDAFRIV

SEQ ID NO: 367 - protein, 563 aa, Salmonella typhimurium
MLILNGFSSATLALITPPFLPKGGKALSQSGPDGLASITLPLPISAERGFAPAWRCTTAAVAAMALRRGLVLRDNEHCPPHQPCVPQYNDSDEFLGPDGEVLVQTLSTGDAPNPVTSFAYGDVSFPQSYTVTRYQPRTESSFYRLEYWVGNSNGDDFWLLHDSNGILHLLGKTAAARLSDPQAASHTAQWLVEESVTPAGEHIYYSYLAENGDNVDLNGNEAGRDRSAMRYLSKVQYGNATPAADLYLWTSATPAVQWLFTLVFDYGERGVDPQVPPAFTAQNSWLARQDPFSLYNYGFEIRLHRLCRQVLMFHHFPDELGEADTLVSRLLLEYDENPILTQLCAARTLAYEGDGYRRAPVNNMMPPPPPPPMMGGNSSRPKSKWAIVEESKQIQALRYYSAQGYSVINKYLRGDDYPETQAKETLLSRDYLSTNEPSDEEFKNAMSVYINDIAEGLSSLPETDHRVVYRGLKLDKPALSDVLKEYTTIGNIIIDKAFMSTSPDKAWINDTILPPNTKLKIESIVNCGSQDFASQLSKLRLSDDATADTNRIKRIINMRVLNS

SEQ ID NO: 368 - protein, 217 aa, Salmonella typhimurium
MNQTLLSSFGTPFERVELALDALREGRGVMVLDDEDRENEGDMIFPAETMTVEQMALTIRHGSGIVCLCITEDRRKQLDLPMMVENNTSAYGTGFTVTIEAAEGVTTGVSAADRVTTVRAAIKDGAKPSDLNRPGHVFPLRAQAGGVLTRGGHTEATIDLMTLAGFKPAGVLCELTNDDGTMARAPECIAFAGQHNMAVVTIEDLVAYRQAHERKAS

SEQ ID NO: 369 - protein, 517 aa, Salmonella typhimurium
MDKYNLKDALLFISRGDTHEILIETNQRTRPDVQSNLQELLKLYPDINPKVVSLSELQEAGQDEKNRGPKERIIHLKDLADVSESEKKVLSYFETARKLGASDIHFLISESIFKVRMRIFGELQTVDEDQPALGYSLCATAILSMADVTETSFFPQREQDARLSPQLMRKIGIFGARYSHRPTGDGLIAVMRLIPDDGDKVPTFKQLGFIPEQIRLLNIMLRRPEGKIVLSGPTGSGKSTTLRSACRVYLDDNQGRHLLTIEDPLEGQILGATQTPIICDKSDEDAVKLAWSRAISSAMRLDPDAIMEGEMRDLISMMSTTYAAQTGHIVLTTLHTNSALGIPERMITMGMNADLICDAQLLIGMISQRLVPTLCPSCRIPWEKRAPELSDDERDYLERHCNKDSLCSTDNIWFRNHHGCSECNHDVIINGRKRGEIGKGLTGRTVIAEVIEPDNRLFQILKTRGKVAARKYWLENMKGISRVEHLLRRINEGLVDPLEADRIIPLDEDERLSIDDV

SEQ ID NO: 370 - protein, 572 aa, Salmonella typhimurium
MRTSQYLLSTLKETPADAEVISHQLMLRAGMIRKLASGLYTWLPTGLRVLKKVENIVREEMNNAGAIEVSMPVVQPADLWQESGRWEQYGPELLRFVDRGERPFVLGPTHEEVITDLVRNELSSYKQLPLNFFQIQTKFRDEVRPRFGVMRSREFLMKDAYSFHTSQESLQETYDAMYAAYSRIFSRMGLDFRAVQADTGSIGGNASHEFQVLAQSGEDDIVFSDVSDYAANIELAEAIAPQTPRAAATQEMTLVDTPNAKTIAELVEQFNLPIEKTVKTLLVKAVKDSKSPLVALLVRGDHELNEVKAEKLPHVASPLTFATEEEIRAVINAGPGSLGPVNMPIPVIIDRTVAAMSDFAAGANIDGKHYFGINWDRDVATPVVADIRNVVAGDPSPDGQGTLLIKRGIEVGHIFQLGTKYSEALKASVQGEDGRNQILTMGCYGIGVTRVVAAAIEQNFDERGIVWPDAIAPFQVAILPMNMHKSFRVQELAEKLYSELRAQGIEVLMDDRKERPGVMFADMELIGIPHTIVIGDRNLDNDDIEYKYRRSGEKSLIKTGDIVDYLVKAIKG

SEQ ID NO: 371 - protein, 607 aa, Salmonella typhimurium
MIENLRNIAIIAHVDHGKTTLVDKLLQQSGTFDARAETQERVMDSNDLEKERGITILAKNTAIKWNDYRINIVDTPGHADFGGEVERVMSMVDSVLLVVDAFDGPMPQTRFVTKKAFAHGLKPIVVINKVDRPGARPDWVVDQVFDLFVNLDATDEQLDFPIIYASALNGIAGLDHEDMAEDMTPLYQAIVDHVPAPDVDLDGPLQMQISQLDYNNYVGVIGIGRIKRGKVKPNQQVTIIDSEGKTRNAKVGKVLTHLGLERIDSNIAEAGDIIAITGLGELNISDTICDPQNVEALPALSVDEPTVSMFFCVNTSPFCGKEGKFVTSRQILDRLNKELVHNVALRVEETEDADAFRVSGRGELHLSVLIENMRREGFELAVSRPKVIFREIDGRKQEPYENVTLDVEEQHQGSVMQALGERKGDLKNMNPDGKGRVRLDYVIPSRGLIGFRSEFMTMTSGTGLLYSTFSHYDDIRPGEVGQRQNGVLISNGQGKAVAFALFGLQDRGKLFLGHGAEVYEGQIIGIHSRSNDLTVNCLTGKKLTNMRASGTDEAVILVPPIKMSLEQALEFIDDDELVEVTPTSIRIRKRHLTENDRRRANRGQKEE

SEQ ID NO: 372 - protein, 933 aa, Salmonella typhimurium
MQNSALKAWLDSSYLSGSNQSWIEQLYEDFLTDPDSVDANWRLTFQQLPGTGVKPDQLHSKTREYFRRQALAGSRHSSTISDPDTNVKQVKVLQLINAYRFRGHQHANLDPLGLWKQERVADLDPSFHDLTEADFQETFNVGSFASGKETMKLGELLDALKQTYCGPIGAEYMHITSTEEKRWIQQRIESGRAAFSADEKKRFLNELTAAEGLERYLGAKFPGAKRFSLEGGDALIPMLKEMVRHAGNSGTREVVLGMAHRGRLNVLINVLGKKPQDLFDEFAGKHKEHLGTGDVKYHMGFSSDIETEGGLVHLALAFNPSHLEIVSPVVMGSVRARLDRLDEPSSNKVLPITIHGDAAVTGQGVVQETLNMSKARGYEVGGTVRIVINNQVGFTTSNPLDARSTPYCTDIGKMVQAPIFHVNADDPEAVAFVTRLALDFRNTFKRDVFIDLVCYRRHGHNEADEPSATQPLMYQKIKKHPTPRKIYADKLEADKVATLEDATEMVNLYRDALDAGECVVKEWRPMNMHSFTWSPYLNHEWDEAYPNKVEMKRLQELAKRISTVPEAIEMQSRVAKIYGDRQAMAAGEKLFDWGGAENLAYATLVDEGIPVRLSGEDSGRGTFFHRHAVIHNQTNGSTYTPLQHIHSGQGQFKVWDSVLSEEAVLAFEYGYATAEPRTLTIWEAQFGDFANGAQVVIDQFISSGEQKWGRMCGLVMLLPHGYEGQGPEHSSARLERYLQLCAEQNMQVCVPSTPAQVYHMLRRQALRGMRRPLVVMSPKSLLRHPLAVSTLDELANGSFQPAIGEIDELDPKAVKRVVMCSGKVYYDLLEQRRKNDQKDVAIVRIEQLYPFPHKAVQEALQPYAHVHDFVWCQEEPLNQGAWYCSQHHFREVTPFGAALRYAGRPASASPAVGYMSVHQKQQQDLVNDALNVD

SEQ ID NO: 373 - protein, 426 aa, Salmonella typhimurium
MQNNNITIRQTRLQGHEGLWQITIENGRFSRIEPQEAASLPQGEVLDAEGGLAIPPFVEPHIHLDTTQTAGEPSWNQSGTLFEGIERWAERKAMLTHEDVKARAMQTLKWQMANGIQYVRTHVDVSDPTLTALKAMLEVKQEVAPWVDLQIVAFPQEGVLSYPNGEALLEEAVRLGADVIGAIPHFEFTREYGVESLHKIFALAQKYDRLIDVHCDEIDDEQSRFVETVAALAHRDSMGARVTASHTTAMHSYNGAYASRLFRLLKMSGINFVANPLVNIHLQGRFDTYPKRRGVTRVKEMLEAGINVCFGHDDVFDPWYPLGTANMLQVLHMGLHVCQLMGYGQINDGLNLITIHSAKTLHLQDYGLSVGNAANLVILPAENGFDAVRRQTPARYSIRHGRVIAETVPSQTTLHLTQPEAVTFKR

SEQ ID NO: 374 - protein, 185 aa, Salmonella typhimurium
MISDIRKDAEVRMEKCVEAFKTQISKVRTGRASPSLLDGIVVEYYGTPTPLRQLASVTVEDSRTLKINVFDRSMGPAVEKAIMASDLGLNPSSAGTDIRVPLPPLTEERRKDLTKIVRGEAEQARVAVRNVRRDANDKVKALLKDKAISEDDDRRSQEEVQKMTDAAIKKVDAALADKEAELMQF

SEQ ID NO: 375 - protein, 292 aa, Salmonella typhimurium
MFTGSIVALVTPMDEKGNVSRSCLKKLIDYHVANGTSAIVSVGTTGESATLSHDEHGDVVMMTLELADGRIPVIAGTGANATAEAISLTQRFNDSGIVGCLTVTPYYNRPTQEGLFQHFKAIAEHTDLPQILYNVPSRTGCDMLPETVGRLAEIKNIIAIKEATGNLTRVHQIKELVSDDFILLSGDDASALDFMQLGGHGVISVTANVAAREMADMCKLAAEGQFAEARAINQRLMPLHNKLFVEPNPIPVKWACKALGLVATDTLRLPMTPITDHGRDIVKAALQHAGLL

SEQ ID NO: 376 - protein, 715 aa, Salmonella typhimurium
MTTTSAFMLNVRLDNVAVVAIDVPGEKVNTLKAEFATQVRAILKQIRENKALQGVVFISAKADNFIAGADINMIGHCQNAQEAETLARQGQQLMAEIQALPVPVIAAIHGACLGGGLEMALACHRRICTDDVKTVLGLPEVQLGLLPGSGGTQRLPRLVGVSTALDMILTGKQLRARQALKAGLVDDVVPQTILLEAAVELAKKERLAQRTLPVRERILAGPLGRALLFRLVRKKTAQKTQGNYPATERIIDVIETGLAQGSSSGYDAEARAFGELAMTPQSQALRAIFFASTEVKKDPGSDAPPGPLNSVGILGGGLMGGGIAWVTACKGGLPVRIKDINTQGINHALKYSWDLLETKVRRRHIKASERDKQLALISGSTDYRGFSHRDLVIEAVFEDLPLKQQMVAEVEQNCAAHTIFASNTSSLPIGDIAANAARPEQVIGLHFFSPVEKMPLVEVIPHASTSAQTIATTVKLAKKQGKTPIVVSDKAGFYVNRILAPYINEAIRMLTEGERVEHIDAALVKFGFPVGPIQLLDEVGIDTGTKIIPVLEAAYGERFSAPANVVASILNDDRKGRKNGRGFYLYGEKGRKSKKQVDPAIYKLIGVQGQSRLSAQQVAERCVMLMLNEAARCFDEKVIRSARDGDIGAVFGIGFPPFLGGPFRYMDALGPGEMVATLQRLAALYGPRYAPCEQLVRMAERREHFWTNGETDQGN

SEQ ID NO: 377 - protein, 198 aa, Salmonella typhimurium
MAKILVLYYSMYGHIETMAHAVAEGAKKVDGAEVIIKRVPETMPPEIFAKAGGKTQNAPVATPQELADYDAIIFGTPTRFGNMSGQMRTFLDQTGGLWASGSLYGKLGSVFSSTGTGGGQEQTITSTWTTLAHHGMVIVPIGYAAQELFDVSQVRGGTPYGATTIAGGDGSRQPSQEELSIARYQGEYVAGLAVKLNG

SEQ ID NO: 378 - protein, 437 aa, Salmonella typhimurium
MVMSQKTLFTKSALAVAVAIISTQAWSAGFQLNEFSSSGLGRAYSGEGAIADDAGNVSRNPALITMFDRPTFSAGAVYIDPDVNISGTSPSRRTLDADNIAPTAWVPNVHFVAPINDQFGWGASITSNYGLATEFNDTYAGGSVGGTTDLETMNLNLSGAYRLNEAWSFGLGFDAVYARAKIERFAGDLGQLVAAQNPALAPVAGQIPSDTKIAHLNGNQWGFGWNAGILYELDKNNRYALTYRSEVKIDFKGNYSSDLPIAINRFNLPIPTATGGATQSGYLTLNLPEMWEVSGYNRVAPQWAIHYSLAYTSWSQFQELKAKSTAGDTLFEKHEGFKDAYRIALGTTYYYDDNWTFRTGIAFDDSPVPAQNRSISIPDQDRFWLSAGTTYAFNKDASVDVGVSYMHGQSVKINEGPYQFESEGKAWLFGTNFNYAF

SEQ ID NO: 379 - protein, 750 aa, Salmonella typhimurium
MSHNEKSPHQSPVHDTRESQPGLDSLAPSDGSHRPTPETTPPGAQPTAPGSLKAPETANDKLTALDAFRKGSENYALTTNQGVRIADDQNSLRAGSRGPTLLEDFILREKITHFDHERIPERIVHARGSAAHGYFQPYKDLSDITKAAFLCDPQKITPVFVRFSTVQGGAGSADTVRDIRGFATKFYTEEGIFDLVGNNTPIFFIQDAHKFPDFVHAVKPEPHWAIPQGQSAHDTFWDYVSLQPETLHNVMWAMSDRGIPRSYRTMEGFGIHTFRLINAQGKATFVRFHWKPLAGKASLVWDESQKLTGRDPDFHRRDLWEAIEAGDFPEYELGLQLIAEEDEFKFDFDLLDPTKLIPEELVPVQRVGKMVLNRNPDNFFAENEQAAFHPGHIVPGIDFTNDPLLQGRLFSYTDTQISRLGGPNFHEIPINRPTCPYHNFQRDGMHRMDIDTNPANYEPNSINDNWPRETPPAPKRGGFESYQERVDGNKIRERSPSFGEYYSHPRLFWLSQTPIEQQHIIDAFSFELGKVARAYIRERVVDQLAHIDVTLAQGVAHNLGFALTHEQTQIAPPPDVNGLKKDPALSLYAVPDGDVKGRVVAILLNDKVNAAELLTILQALKAKGVHAKLLYSRMGEVTADDGSTLTIAATFAGAPSLTVDAVIVPCGNIADIESCGDARYYLLEAYKHLKPIALAGDARRFKALLNIDSQGEEGLVEADNVDHHFMDTLLTLMAAHRVWSRAGKINAIPA

SEQ ID NO: 380 - protein, 729 aa, Salmonella typhimurium
MSFVSTNNKSGMGGLTTTTPPITGESGGVTADSVAGSVADAAESAVEQAAGSLFGALPEPSGLVKAAVAAAQAAAAAGMAQDAVSAIVSAVAGGPGAHNVTVSGSAVPPGALLFASLDGGETLSELFSYVVQLKTPDTLNLGYVSPAANLPLKPMVGKDLCVNIELDGGGKRHISGLVTAARVVGHEGRSVTYELRMEPWVKLLTHTSDYKAFQNKTVVDILDEVLAEYPYPVEKRLVESYPVRTWQVQYGETDFDFLQRLMQEWGIYWWFEHSEDSHTLVLADAISAHKACPDSPLVEWHQEGLKLDKEFIHTITANESLRTGQWVLDDFDFTKPRSLLANTVANPRETGHATYEHYEWPGDYFDKSEGEMLTRIRMEAQRSPGSRVLGGGNIRTLMTGYTFTLENYPTAEVNQEYLLMQTLLFVQDNAQHSGQDQHFTFSTRFELHPTREVFRPQRTVSKPHTKGPQSAIVTGPAGQEIWTDQYGRVKVQFGWDRYGKMDENSSCWIRVSYPWAGKGFGMIQIPRIGQEVLVDFKNGDPDLPIIVGRTYNQDTMPPWGLPGMASQSGIFSHSLYGGPTNGNMLRFDDKTGAEEVKFHAEKDLNTTVKNNETHTVMVDRTKTIIKNETNSIGEDRNTTVTKNDGLSVKLAQTINIGTTYRLDVGDQFTLRCGNAALVLHKDGSIEFCGKQLMLHTSDVMQLIGKGIDMNPDGGTAVTADDIAPLLTSE

SEQ ID NO: 381 - protein, 296 aa, Salmonella typhimurium
MNMKKLATLVSAVALSATVSANAMAKDTIALVISTLNNPFFVSLKDGAQKEADKLGYNLVVLDSQNNPAKELANVQDLTVRGTKILLINPTDSDAVGNAVKMANQAKIPVITLDRQATKGDVVSHIASDNVLGGKIAGDYIAKKAGEGAKVIELQGIAGTSAARERGEGFQQAVAAHKFNVLASQPADFDRTKGLNVMQNLLTAHPDVQAVFAQNDEMALGALRALQTAGKADVMVVGFDGTPDGEKAVKDGKLAATIAQLPDQIGAKGVEVADKVLKGEKVQAKYPVDLKLVIKQ

SEQ ID NO: 382 - protein, 284 aa, Salmonella typhimurium
MKQKVVNIGDIKVANDLPFVLFGGMNVLESRDLAMRICEHYVTVTQKLGIPYVFKASFDKANRSSIHSYRGPGLEEGMKIFQELKQTFGVKVITDVHEASQAQPVADVVDVIQLPAFLARQTDLVEAMAKTGAVINVKKPQFVSPGQMGNIVDKFHEGGNDKVILCDRGANFGYDNLVVDMLGFSVMKKVSGNSPVIFDVTHALQCRDPFGAASGGRRGQVTELARAGMAVGLAGLFLESHPDPANAKCDGPSALPLAKLEQFLTQIKAIDDLVKSFDELDTEN

SEQ ID NO: 383 - protein, 467 aa, Salmonella typhimurium
MASISSLGVGSNLPLDQLLTDLTKNEKGRLTPITKQQSANSAKLTAYGTLKSALEKFQTANTALNKADLFKSTVASSTTEDLKVSTTAGAAAGTYKINVTQLAAAQSLATKTTFATTKEQLGDTSVTSRTIKIEQPGRKEPLEIKLDKGDTSMEAIRDAINDADSGIAASIVKVKENEFQLVLTANSGTDNTMKITVEGDTKLNDLLAYDSTTNTGNMQELVKAENAKLNVNGIDIERQSNTVTDAPQGITLTLTKKVTDATVTVTKDDTKAKEAIKSWVDAYNSLVDTFSSLTKYTAVEPGEEASDKNGALLGDSVVRTIQTGIRAQFANSGSNSAFKTMAEIGITQDGTSGKLKIDDDKLTKVLKDNTAAARELLVGDGKETGITTKIATEVKSYLADDGIIDNAQDNVNATLKSLTKQYLSVSNSIDETVARYKAQFTQLDTMMSKLNNTSSYLTQQFTAMNKS

SEQ ID NO: 384 - protein, 404 aa, Salmonella typhimurium
MKLPIYLDYSATTPVDPRVAEKMMQFLTLDGTFGNPASRSHRFGWQAEEAVDIARNQIAELVGADPREIVFTSGATESDNLAIKGAANFYQKKGKHIITSKTEHKAVLDTCRQLEREGFEVTYLAPQRNGIIDLNELEAAMRDDTILVSIMHVNNEIGVVQDIATIGEMCRARGIIYHVDATQSVGKLPIDLSQLKVDLMSFSGHKIYGPKGIGALYVRRKPRIRIEAQMHGGGHERGMRSGTLPVHQIVGMGEAYRIAKEEMETEMARLRGLRNRLWNGIKDIEEVYLNGDLEQGAPNILNVSFNYVEGESLIMALKDLAVSSGSACTSASLEPSYVLRALGMNDELAHSSIRFSLGRFTTEEEIDYTIDLVRKSIGRLRDLSPLWEMYKQGVDLNSIEWAHH

SEQ ID NO: 385 - protein, 219 aa, Salmonella typhimurium
MPALDLIRPSVTAMRVIASVNDGFARELKLPPHIRSLGLITADSDDVTYIAADEATKQAMVEVVYGRSLYAGAAHGPSPTAGEVLIMLGGPNPAEVRAGLDAMVASIENGAAFQWANDAENTAFLAHVVSRTGSYLSSTAGIALGDPMAYLVAPPLEATFGIDAAMKSADVQLVTYVPPPSETNYSAAFLTGSQAACKAACNAFTDAVLDIARNPVQRA

SEQ ID NO: 386 - protein, 899 aa, Salmonella typhimurium
MNAVIPKKRRDGKSSFEDLVSYVSVRDDMTDEELNLSSSSQAEQPHRSRFSRLVDYATRLRNESFVALVDVMKDGCEWVNFYGVTCFHNCTSLETAAADMEYIARQAHYAKDDTDPVFHYILSWQSHESPRPEQIYDSVRHTLKSLGLADHQYVSAVHTDTDNLHVHVAVNRVHPETGYLNRLSWSQEKLSRACRELELKHGFAPDNGCWVHAPGNRIVRKTAVERDRQNAWTRGKKQTFREYVAQTAVAGLRSEPVNDWLSLHRRLAEDGLYLSQMDGKFLVMDGWDRNREGVQLDSFGPSWCAEKLMKKMGDYTPVPKDIFSQVEAPGRYNPDFIAADVRPEKIAETESLQQYACRHLGERLPEMAREGRLENCQAIHRTLAEAGLWMRVQHGHLVICDGYDHNQTPVRADSVWSLLTLDNVNQLDGGWQPVPTDIFRQVTPTERFRGRRMESCPATDKEWHRMRTGTGPQGAIKRELFSDKESLWGYSISHCSPQIEEMITQGEFTWQRCHELFAQQGLMLQKQHHGLVVVDAFNHEQTPVKASSIHPDLTLGRAEPQAGPFVSAPADLFDRVQPESRYNPELAVSDRYGVSSKRDPMLRRQRREARAEARADLRARYLAWREQWRKPDLRYGERCREIHQACRLRKSHIRAQYDDPALRKLHYHIAEVQRMQALIRLKEDIRDERQKLIADGKWYPPSYRQWVEIQAAQGDRAAVSQLRGWDYRDRRKDRSRTTTTDRCVVLCEPGGTPVYGNTGDLEARLQKNGSVRFRDRRTGEFVCTDYGDRVVFRNHHDRNALADKLDLIAPVLFGRDPRMGFEPEGNDKQFNQVFAEMVAWHNVTGRTGHEDYRITRPDVDHHREGSERYYRDYIAANSNDDASLPPPEQDKRWEPPSPG

SEQ ID NO: 387 - protein, 399 aa, Salmonella typhimurium
MGDMKIKTGVGILALSALTTMMISAPALAKIEEGKLVIWINGDKGYNGLAEVGKKFEQDTGIKVTVEHPDKLEEKFPQVAATGDGPDIIFWAHDRFGGYAQSGLLAEVTPDKAFQDKLYPFTWDAVRYNGKLIAYPIAVEALSLIYNKDLVPNPPKTWEEIPALDKELKVKGKSAIMFNLQEPYFTWPLIAADGGYAFKFENGKYDVKDVGVDNAGAKAGLTFLIDMIKNKNMSADTDYSIAEAAFNKGETAMTINGPWAWSNIDKSKVNYGVTLLPTFKGKPSKPFVGVLSAGINAASPNKELAKEFLENYLLTDQGLEAVNKDKPLGAVALKSFQEQLAKDPRIAATMDNAQKGEIMPNIPQMSAFWYAVRTAVINAASGRQTVDAALKDAQSRITK

SEQ ID NO: 388 - protein, 290 aa, Salmonella typhimurium
MCTTCGCAEGNLYIEGDEHNPHSAFRSAPFAPAARPALNITGIKTPDFAPSQTAEGDLHYGHGEAGTHAPGMSQRRMLEVEIDVLDKNNRLAERNRARFAARQQLVLNLVSSPGSGKTTLLTETLMKLKDRVPCAVIEGDQQTVNDAARIRATGTPAIQVNTGKGCHLDAQMIADAAPRLPLDDHGILFIENVGNLVCPASFDLGEKHKVAVLSVTEGEDKPLKYPHMFAAASLMLLNKVDLLPYLNFDVEKCIASAREVNPEIEIILISATSGEGMDQWLAWLEAQRCA

SEQ ID NO: 389 - protein, 214 aa, Salmonella typhimurium
MMQPSIKPADEGSAGDIIARIGSLTRMLRDSLRELGLDQAIAEAAEAIPDARDRLDYVVQMTAQAAERALNSVEASQPHQDAMEKEAKALTQRWDEWFDNPIELSDARELVTDTRQFLRDVPGHTSFTNAQLLDIMMAQDFQDLTGQVIKRMMDVIQEIERQLLMVLLENIPEQSARPKRENESLLNGPQVDTSKAGVVASQDQVDDLLDSLGF

SEQ ID NO: 390 - protein, 672 aa, Salmonella typhimurium
MSDIDALQALTSQMTQEGIRRLLVISGDAAWCRKRAEAIRAALPGDWLWVAPDAPAQPCCTPQALQTLLGREFRHAIFDAWQGFDAAAFAALSGTLQAGSWLLLLMPPYETWESRPDTDSLRWSDCAQPIPTPQFAQHLKRTLSRDPQTLLWRQRQPFCWPSYPSRECWRPATGEPQPEQAAILSRLREMPPGVATVIAPRGRGKSALAGQFISRMAGTAIVTAPAKTATDILAAFAGERFCFMAPDALLASGARADWLVVDEAAAIPTPLLLQLVSRFPRILLTTTVQGYEGTGRGFLLKFCARFPQLHRFTLRQPVRWAPECPLENIVSEALIFDDEAFAQAPHGAIEISAFYQQAWVNTPALPRAVYQLLSGAHYRTSPLDLRRMMDAPGQHFLQATANNRVAGALWLVEEGGLSAELSQAVWCGFRRPRGNLVAQSLAAHGSDPLAATLVGRRVSRIAVHPARQREGIGQQLIACACMQAAQCDYLSVSFGYTPKLWRFWQRCGFVLVRMGNHREASSGCYTAMALLPLSDAGKRLAQQEHRRLRRDADILTQWNGEAIPLAALREQALNDEDWRELVGFAFAHRPLLTSLGCLHRLLQYSALPLPALRGRLEEKASDAELCARLRISGRKALLALQRAQAAQALIALDAGRTQSLRDVMPGGGDHAG

SEQ ID NO: 391 - protein, 387 aa, Salmonella typhimurium
MMKNDILITGGHIIDPARNINEINNLRIINDIIVDADKYPVTSETRIIHADGMIVTPGLIDYHAHVFYDATEGGVRPDMYMPPNGVTTVVDAGSAGTANFDAFYRTVICASKVRIKAFLTVSPPGQTWSQENYDPDNIDENKIHALFRQYRNVLQGLKLKVQTEDIAEYGLKPLTESLRIANDLKCPVAIHSTHPVVPMKELVSLLRRGDIIAHAFHGKGSTILTDEGVVLAEVRQARERGVIFDAANGRSHFSMNTARRAIANGFLPDIISSDLSTITKLAWPVYALPWILSKYLALGVALTDVINACTHTPAVLMGMAAEIGTLAPGAFADIAIFKLKNRHVEFADIHGETLTGTHVLVPQMTIKSGEILFRQIDFGARPNGVEK

SEQ ID NO: 392 - protein, 445 aa, Salmonella typhimurium
MSNRKYFGTDGIRGRVGNAPITPDFVLKLGWAAGKVLARHGSRKIIIGKDTRISGYMLESALEAGLAAAGLSASFTGPMPTPAVAYLTRTFRAEAGIVISASHNPFYDNGIKFFSIDGTKLPDDVEEAIEAEMEKEITCVDSAELGKASRIVDAAGRYIEFCKGTFPNELSLNGLKVVVDCANGATYHIAPNVLRELGATVIAIGCEPNGVNINEEVGATDVRALQARVLAEKADLGIALDGDGDRVIMVDHEGNKVDGDQIMYIIAREGLRQGQLRGGAVGTLMSNMGLELALKQLGIPFARAKVGDRYVLEKLQEKGWRIGAENSGHVILLDKTTTGDGIVAGLQVLAAMVRNHMSLHDLCSGMKMFPQILVNVRYTAGSGDPLENEAVKAVTADVEATLGNRGRVLLRKSGTEPLIRVMVEGEDEAQVTAFAHRIADAVKAV

SEQ ID NO: 393 - protein, 444 aa, Salmonella typhimurium
MTVTTFSELELDESLLDALQDKGFTRPTAIQAAAIPPALDGRDVLGSAPTGTGKTAAYLLPALQHLLDFPRKKSGPPRILILTPTRELAMQVADHARELAKHTHLDIATITGGVAYMNHAEVFSENQDIVVATTGRLLQYIKEENFDCRAVETLILDEADRMLDMGFAQDIEHIAGETRWRKQTMLFSATLEGDAIKDFAERLLEDPVEVSANPSTRERKKIHQWYYRADNFEHKVALLKHLLKQDDATRSIVFVRKRERVHELAETLRLAGINNCYLEGEMAQIKRNEGIKRLTDGRVNVLVATDVAARGIDIPDVSHVINFDMPRSGDTYLHRIGRTGRAGRKGTAISLVEAHDHLLLLKIGRYIEEPLKARVIDELRPTTRAPSEKLTGKPSKKVLAKRAEKKKEKEKEKPRVKKRHRDTKNIGKRRKPSGTKMQEQSSEE

SEQ ID NO: 394 - protein, 554 aa, Salmonella typhimurium
MCSIFGVFDIKTDAAELRKKALELSRLMRHRGPDWSGIYACDNAILAHERLSIVDVNAGAQPLYNARKTHVLAVNGEIYNHQTLRAEYGDRYAFQTGSDCEVILALYQEKGPDFLDDLQGMFAFALYDSEKDAYLIGRDHIGIIPLYMGYDEFGNFYVASEMKALTPVCRTIKEFPAGSYLWSKDGEIRQYYQRDWFEFDAVKDNVTDKNALRQALEESVKSHLMSDVPYGVLLSGGLDSSVISAITKKFAARRVEDQERSEAWWPQLHSFAVGLEGSPDLKAAQEVANHLGTVHHEIHFTVQEGLDAIRDVIYHIETYDVTTIRASTPMYLMSRKIKAMGIKMVLSGEGSDEVFGGYLYFHKAPNAKELHEETVRKLQALHMYDCARANKAMSAWGVEARVPFLDKKFLDVAMRINPQDKMCGNGKMEKHVLRECFESYLPASVAWRQKEQFSDGVGYSWIDTLKEVAAKQISDQQLETARFRFPYNTPSSKEAYLYREIFEELFPVPSAAECVPGGPSVACSSAKAIEWDEAFKTMDDPSGRAVGVHQSAYQ

SEQ ID NO: 395 - protein, 59 aa, Salmonella typhimurium
MAKTIKITQTRSAIGRLPKHKATLLGLGLRRIGHTVEREDTPAVRGMVNAVSFMVKVEE

SEQ ID NO: 396 - protein, 469 aa, Salmonella typhimurium
MSAEHVLTMLNEHEVKFVDLRFTDTKGKEQHVTIPAHQVNAEFFEEGKMFDGSSIGGWKGINESDMVLMPDASTAVIDPFFADSTLIIRCDILEPGTLQGYDRDPRSIAKRAEDYLRATGIADTVLFGPEPEFFLFDDIRFGASISGSHVAIDDIEGAWNSSTKYEGGNKGHRPGVKGGYFPVPPVDSAQDIRSEMCLVMEQMGLVVEAHHHEVATAGQNEVATRFNTMTKKADEIQIYKYVVHNVAHRFGKTATFMPKPMFGDNGSGMHCHMSLAKNGTNLFSGDKYAGLSEQALYYIGGVIKHAKAINALANPTTNSYKRLVPGYEAPVMLAYSARNRSASIRIPVVASPKARRIEVRFPDPAANPYLCFAALLMAGLDGIKNKIHPGEAMDKNLYDLPPEEAKEIPQVAGSLEEALNALDLDREFLKAGGVFTDEAIDAYIALRREEDDRVRMTPHPVEFELYYSV

SEQ ID NO: 397 - protein, 287 aa, Salmonella typhimurium
MKKTLLAVSAALALTSSFTANAAENDQPQYLSDWWHQSVNVVGSYHTRFSPKLNNDVYLEYEAFAKKDWFDFYGYIDIPKTFDWGNGNDKGIWSDGSPLFMEIEPRFSIDKLTGADLSFGPFKEWYFANNYIYDMGDNKASRQSTWYMGLGTDIDTGLPMGLSLNVYAKYQWQNYGASNENEWDGYRFKVKYFVPITDLWGGKLSYIGFTNFDWGSDLGDDPNRTSNSIASSHILALNYDHWHYSVVARYFHNGGQWQNGAKLNWGDGDFSAKSTGWGGYLVVGYNF

SEQ ID NO: 398 - protein, 812 aa, Salmonella typhimurium
MSQDPFQEREAEKYANPIPSREFILEHLTKREKPASREELAVELNIEGEEQLEALRRRLRAMERDGQLVFTRRQCYALPERLDLLKGTVIGHRDGYGFLRVEGRKDDLYLSSEQMKTCIHGDQVLAQPLGADRKGRREARIVRVLVPKTSQIVGRYFTDAGVGFVVPDDSRLSFDILIPPEDVMGARMGFVVVVELTQRPTRRTKAVGKIVEVLGDNMGTGMAVDMALRTHEIPYIWPQAVEQQVAGLKEEVPEEAKVGRVDLRDLPLVTIDGEDARDFDDAVYCEKKRGGGWRLWVAIADVSYYVRPPTPLDREARNRGTSVYFPSQVVPMLPEVLSNGLCSLNPQVDRLCMVCEMTISAKGRLTGYKFYEAVMSSHARLTYTKVWHMLQGDQDLREQYAPLVKHIEELHNLYKVLDKAREERGGISFESEEAKFIFNAERRIERIEQTQRNDAHKLIEECMIMANISAARFVEKAKEPALFRIHDKPTTEAITSFRSVLAELGLELPGGNKPEPRDYAELLESIADRPDAEMLQTMLLRSMKQAIYDPENRGHFGLALQSYAHFTSPIRRYPDLSLHRAIKYLLAKEQGNKGNTTETGGYHYSMEEMLQLGQHCSMAERRADEATRDVSDWLKCDFMLDQVGNVFKGVIASVTGFGFFVRLDELFIDGLVHVSSLDNDYYRFDQVGQRLIGESGGQTYRLGDRVEVRVEAVNMDERKIDFSLISSERAPRNVGKTAREKAKKGESKNAGKRRQVGKKVNFEPDSAFRGEKKAKPKAAKKDARKAKKPSAKTQKIAAATKAKRAAKKKAAE

SEQ ID NO: 399 - protein, 90 aa, Salmonella typhimurium
MNKSQLIEKIAAGADISKAAAGRALDAIIASVTESLKEGDDVALVGFGTFAVKERAARTGRNPQTGKEITIAAAKVPSFRAGKALKDAVN

SEQ ID NO: 400 - protein, 100 aa, Salmonella typhimurium
MIREERLLKVLRAPHVSEKASTAMEKTNTIVLKVAKDATKAEIKAAVQKLFEVEVEVVNTLVVKGKVKRHGQRIGRRSDWKKAYVTLKEGQNLDFVGGAE

SEQ ID NO: 401 - protein, 137 aa, Salmonella typhimurium
MTYHLDVVSAEQQMFSGLVEKIQVTGSEGELGIYPGHAPLLTAIKPGMIRIVKQHGHEEFIYLSGGILEVQPGNVTVLADTAIRGQDLDEARAMEAKRKAEEHISSSHGDVDYAQASAELAKAIAQLRVIELTKKAM

SEQ ID NO: 402 - protein, 372 aa, Salmonella typhimurium
MTGDNTLITSHGINRRDFMKLCAALAATMGLSSKAAAEMAESVSNPQRPPVIWIGAQECTGCTESLLRATHPTVENLVLETISLEYHEVLSAAFGHQVEENKHNALEKYKGQYVLVVDGSIPLKDNGIYCMVAGEPIVDHIRKAADGAAAIIAIGSCSAWGGVAAAGVNPTGAVSLQEVLPGKTVINIPGCPPNPHNFLATVAHIITYGTPPKLDAKNRPTFAYGRLIHEHCERRPHFDAGRFAKEFGDEGHRQGWCLYHLGCKGPETWGNCSTLQFCDVGGVWPVAIGHPCYGCNEEGIGFHKGIHQLAHVENQTPRSEKPDVNMKEGGNISAGAVGLLGGVVGLVAGVSVMAVRELGRQQKKDNADSRGE

SEQ ID NO: 403 - protein, 287 aa, Salmonella typhimurium
MAGAKEIRSKIASVQNTQKITKAMEMVAASKMRKSQDRMAASRPYAETMRKVIGHLANGNLEYKHPYLEERDVKRVGYLVVSTDRGLCGGLNINLFKKLLADMKAWSDKGVQCELAMIGSKGVSFFNSVGGNVVAQVTGMGDNPSLSELIGPVKVMLQAYDEGRLDKLYIVSNKFINTMSQVPTITQLLPLPASEDDDLKRKAWDYLYEPDPKALLDTLLRRYVESQVYQGVVENLASEQAARMVAMKAATDNGGSLIKELQLVYNKARQASITQELTEIVSGAAAV

SEQ ID NO: 404 - protein, 341 aa, Salmonella typhimurium
MKVKAVFINKPGEVETRWVDYPHKKENEVLIKVDAAGICGSDIGAFRGTNPLVTYPRIIGHEVTGIVLQEGAGMPDNIKEGDRVIVDPYIYCGHCYPCSVGRTNCCENLNVIGVHVDGAMQEVVTHPAHLIHKIPDNVPSEMAPLAEPLTIALHALHRANVKAGEYVAIIGAGAIGLMAALSARHYKATPILIDIVEERLRYAQKLGVPYVLNAADDQVIDAIKNITHGTMAQVVIEASGANSAIRNTLDLASFAGRISFTGWPKQETSLPTNLITYKELDLRGSRTSAGEFDEALRMLSTLEINPQDVVSKVVNLDEIPDAVKELDRYPERYLKINAVFH

SEQ ID NO: 405 - protein, 332 aa, Salmonella typhimurium
MATMKDVARLAGVSTSTVSHVINKDRFVSETITEKVEAAIKSLNYAPSALARSLKLNQTRTIGMLITASTNPFYSELVRGVERSCFERGYSLVLCNTEGDEQRMNRNLETLMQKRVDGLLLLCTETHQPSREIMERYPSIPTVMMDWSPFDGEGDSDLIQDNSLLGGDLATQYLIDKGFTRIACITGPLDKTPARLRLEGYRAAMKRAGLAIPQGYEITGDFEFGGGFDAMQALLAHQQRPQAVFTGNDAMAVGAYQALYQAGLRIPQDMAVIGYDDIELARYMTPPLTTIHQPKDELGELAIDVLIHRMAQPALQQQRLQLTPVLTVRGSV

SEQ ID NO: 406 - protein, 251 aa, Salmonella typhimurium
MVEDSQETTHFGFQTVAKEQKADMVAHVFHSVASKYDVMNDLMSFGIHRLWKRFTIDCSGVRRGQTVLDLAGGTGDLTAKFSRMVGETGKVILADINDSMLKMGREKLRNIGVIGNVEYVQANAEALPFPDNTFDCITISFGLRNVTEKEKALRSMFRVLKPGGRLLVLEFSKPIIEPLSKAYDAYSFHILPRIGSMVANDADSYRYLAESIRMHPDQDTLKAMMQDAGFESVDYYNLTAGVVALHRGYKF

SEQ ID NO: 407 - protein, 192 aa, Salmonella typhimurium
MYQDLIRNELNEAAETLANFLKDDANIHAIQRAAVLLADSFKAGGKVLSCGNGGSHCDAMHFAEELTGRYRENRPGYPAIAISDVSHISCVSNDFGYDYIFSRYVEAVGREGDVLLGISTSGNSGNVIKAIAAAREKGMKVITLTGKDGGKMAGTADIEIRVPHFGYADRIQEIHIKVIHILIQLIEKEMVK

SEQ ID NO: 408 - protein, 857 aa, Salmonella typhimurium
MRLDRLTNKFQLALADAQSLALGHDNQFIEPLHLMSALLNQEGGSIRPLLTSAGINAGQLRTAIDQALSRLPQVEGTGGDVQPSSELVRVLNLCDKLAQKRGDNFISSELFVLAALESRGTLTDLLKSAGATTANITQAIEQMRGGESVNDQGAEDQRQALKKYTVDLTERAEQGKLDPVIGRDEEIRRTIQVLQRRTKNNPVLIGEPGVGKTAIVEGLAQRIINGEVPEGLKGRRVLALDMGALVAGAKYRGEFEERLKGVLNDLAKQEGNVILFIDELHTMVGAGKADGAMDAGNMLKPALARGELHCVGATTLDEYRQYIEKDAALERRFQKVFVAEPSVEDTIAILRGLKERYELHHHVQITDPAIVAAATLSHRYIADRQLPDKAIDLIDEAASSIRMQIDSKPEELDRLDRRIIQLKLEQQALMKESDEASKKRLDMLNEELDDKERQYSELEEEWKAEKASLSGTQTIKAELEQAKIAIEQARRVGDLARMSELQYGKIPELEKQLEAATQSEGKTMRLLRNKVTDAEIAEVLARWTGIPVSRMLEGEREKLLRMEQELHSRVIGQNEAVEAVSNAIRRSRAGLSDPNRPIGSFLFLGPTGVGKTELCKALANFMFDSDDAMVRIDMSEFMEKHSVSRLVGAPPGYVGYEEGGYLTEAVRRRPYSVILLDEVEKAHPDVFNILLQVLDDGRLTDGQGRTVDFRNTVVIMTSNLGSDLIQERFGELDYGRMKEMVLGVVSQNFRPEFINRIDEVVVFHPLGEQHIASIAQIQLQRLYKRLEERGYEIHISDEALKLLSANGYDPVYGARPLKRAIQQQIENPLAQQILSGELVPGKVIRLEANDDRIVAVQ

SEQ ID NO: 409 - protein, 266 aa, Salmonella typhimurium
MTTNHQIDRLLTLMQRLRDPENGCPWDKEQTFASIAPYTLEETYEVLDAIAREDFDDLRGELGDLLFQVVFYAQMAQEEGRFDFNDICAAISDKLERRHPHVFGELSADNSEEALVRWEQIKTEERAQKAQHSALDDIPRSFPALMRAQKIQKRCSNVGFDWTTLGPVVDKVYEEIDEVMFEARQAVVDQAKLEEEMGDLLFATVNMARHLGTKAELALQKANDKFERRFREVERIVAARGLEMTGVDLETMEEVWQEVKRQEIDL

SEQ ID NO: 410 - protein, 210 aa, Salmonella typhimurium
MHYIQQPQTIEANSFTIISDIIRETRPDYRFASPLHEAIIKRVIHTTADFDWLDILWFSADALEQLCDALRHPCIIYTDTTMALSGINKRLLATFGGECRCYISDPRVVRAAQTQGITRSMAAVDIAIAEEEKNKLFVFGNAPTALFRLLEHNVTVSGVVGVPVGFVGAAESKEALTHSHFPAVAALGRKGGSNVAAAIVNALLYHLREA

SEQ ID NO: 411 - protein, 892 aa, Salmonella typhimurium
MTDVTLKALAAERQVSVDRLVQQFADAGIRKSADDSVSAQEKQTLLAHLNREAVSGPDKLTLQRKTRSTLNIPGTGGKSKSVQIEVRKKRTFVKRDPQEAERLAAEEQAQREAEEQARREAEEQAKREAQQKAEREAAEQAKREAAEKAKREAAEKDKVSNQQTDDMTKTAQAEKARRENEAAELKRKAEEEARRKLEEEARRVAEEARRMAEENKWTATPEPVEDTSDYHVTTSQHARQAEDENDREVEGGRGRGRNAKAARPAKKGKHAESKADREEARAAVRGGKGGKRKGSSLQQGFQKPAQAVNRDVVIGETITVGELANKMAVKGSQVIKAMMKLGAMATINQVIDQETAQLVAEEMGHKVILRRENELEEAVMSDRDTGAAAEPRAPVVTIMGHVDHGKTSLLDYIRSTKVASGEAGGITQHIGAYHVETDNGMITFLDTPGHAAFTSMRARGAQATDIVVLVVAADDGVMPQTIEAIQHAKAAGVPVVVAVNKIDKPEADPDRVKNELSQYGILPEEWGGESQFVHVSAKAGTGIDELLDAILLQAEVLELKAVRKGMASGAVIESFLDKGRGPVATVLVREGTLHKGDIVLCGFEYGRVRAMRNELGQEVLEAGPSIPVEILGLSGVPAAGDEVTVVRDEKKAREVALYRQGKFREVKLARQQKSKLENMFANMTEGEVHEVNIVLKADVQGSVEAISDSLLKLSTDEVKVKIIGSGVGGITETDATLAAASNAILVGFNVRADASARKVIESESLDLRYYSVIYNLIDEVKAAMSGMLSPELKQQIIGLAEVRDVFKSPKFGAIAGCMVTEGTIKRHNPIRVLRDNVVIYEGELESLRRFKDDVNEVRNGMECGIGVKNYNDVRVGDMIEVFEIIEIQRTIA

SEQ ID NO: 412 - protein, 390 aa, Salmonella typhimurium
MKFVDEASILVVAGDGGNGCVSFRREKYIPKGGPDGGDGGDGGDVWMEADENLNTLIDYRFEKSFRAERGQNGASRDCTGKRGKDVTIKVPVGTRVIDQGTGETMGDMTKHGQRLLVAKGGWHGLGNTRFKSSVNRTPRQKTNGTPGDKRDLLLELMLLADVGMLGMPNAGKSTFIRAVSAAKPKVADYPFTTLVPSLGVVRMDSEKSFVVADIPGLIEGAAEGAGLGIRFLKHLERCRVLLHLIDIDPIDGSDPVENARIIIGELEKYSQDLAAKPRWLVFNKIDLMDKTEAEEKAKAIAEALGWEGKYYLISAASQLGVKDLCWDVMTFIIENPIAQAEEAKQPEKVEFMWDDYHRQQLAEVEEDADDDWDDDWDEDDEEGVEFIYKR

SEQ ID NO: 413 - protein, 453 aa, Salmonella typhimurium
MKLKTTLFGNVYQFKDVKEVLAKANELRSGDVLAGVAAASSQERVAAKQVLSEMTVADIRNNPVIAYEEDCVTRLIQDDVNETAYNRIKNWSISELREYVLSDETSVDDIAFTRKGLTSEVVAAVAKICSNADLIYGGKKMPVIKKANTTIGIPGTFSCRLQPNDTRDDVQSIAAQIYEGLSFGAGDAVIGVNPVTDDVENLTRVLDTVYGVIDKFNIPTQGCVLAHVTTQIEAIRRGAPGGLIFQSICGSEKGLKEFGVELAMLDEARAVGAEFNRIAGENCLYFETGQGSALSAGANFGADQVTMEARNYGLARHYDPFLVNTVVGFIGPEYLYNDRQIIRAGLEDHFMGKLSGISMGCDCCYTNHADADQNLNENLMILLATAGCNYIMGMPLGDDIMLNYQTTAFHDTATVRQLLNLRPSPEFERWLETMGIMANGRLTKRAGDPSLFF

SEQ ID NO: 414 - protein, 833 aa, Salmonella typhimurium
MSQTIDLTLDGLSCGHCVKRVKESLEQRPDVELADVTVTEAHVTGTASADALIETIKQAGYGATLSHPKAKPLTESSIPSEALAAVPHELPVATADEESQQLLLSGMSCASCVTRVQHALQSVPGVTQARVNLAERTALVMGSASAADLVQAVEKAGYGAEAIEDDIKRRERQQETAIATMKRFRWQAIVALAVGIPVMVWGMIGDNMMVTDDNRSLWLAIGLITLAVMVFAGGHFYRNAWKSLLNGTATMDTLVALGTGVAWLYSMSVNLWPQWFPMEARHLYYEASAMIIGLINLGHMLEARARQRSSKALEKLLDLTPPTARVVTEDGEKSVPLADVQPGMLLRLTTGDRVPVDGEITQGEAWLDEAMLTGEPIPQQKGEGDSVHAGTVVQDGSVLFRASAVGSHTTLSRIIRMVRQAQSSKPEIGQLADKISAVFVPVVVAIALFSAAIWYFFGPAPQIVYTLVIATTVLIIACPCALGLATPMSIISGVGRAAEFGVLVRDADALQRASTLDTLVFDKTGTLTEGKPQVVAIKTFNGVEEAQALRLAAALEQGSSHPLAHAILEKAGDDKLPQVNGFRTLRGLGVSGEAEGHQLLLGNQALLNEQHVATDDMTAEITAQASQGSTPVLLAIDGKAAALLAVRDPLRSDSIAALERLHNAGYRLVMLTGDNPTTANAIAKEAGIDEVIAGVLPDGKADAIKRLQSQGRQVAMVGDGINDAPALAQADVGIAMGGGSDVAIETAAITLMRHSLMGVADALAISRATLRNMKQNLLGAFIYNSIGIPVAAGILWPFTGTLLNPVVAGAAMALSSITVVSNANRLLRFKPKA

SEQ ID NO: 415 - protein, 518 aa, Salmonella typhimurium
MKVKLLAAGILFTLPFWACAKDVTIIYTNDLHAHVEPYKVPWIADGKRDIGGWANITTLVKQEKAKNKATWFFDAGDYFTGPYISSLTKGKAIIDILNTMQYDAATIGNHEFDHGWDNTLLQLSRAKFPIVQGNIFYEDSSKSFWDKPYTIVEKDGVKIGVIGLHGVFAFNDTVSAATRVGIEARDEIKWLQRYIDELKGKVDLTVALIHEGTPARQSSMGNTDVRRALDKDIQTASQVKGLDILITGHAHVGTPEPIKVGNTLILSTDSGGIDVGKLVLDYKEKPHHFTVKNFELKTIFADEWKPDPQTKQVIDGWNKKLDKVVQQTVAQSPVELTRAYGESSSLGNLAADALLFTAGKDTQLALTNSGGIRNEIPAGAVTMGAVISTFPFPNELVTMDLTGKQLRSLMEHGAGLSNGVLQVSKGLEMKYDSSKPIGQRVTVLTLNGKPIDDATVYHIATNSFLADGGDGFAAFTEGQARNTSGGYYVSNAIVDYFKAGNTITDEQLKGMRVADVKK

SEQ ID NO: 416 - protein, 228 aa, Salmonella typhimurium
MPAENSVEVHRLRKSVGQGEHELSILTGVELVVKRGETIALIGESGSGKSTLLAILAGLDDGSSGEVSLVGKPLHQMDEEARAQLRAQHVGFVFQSFMLIPTLNALENVELPALLRGENSGQSKAGAKALLEQLGLGKRLDHLPAQLSGGEQQRVALARAFNGRPDVLFADEPTGNLDRQTGDKIADLLFSLNREHGTTLILVTHDPALAARCDRRLRLVNGQLQEEA

SEQ ID NO: 417 - protein, 327 aa, Salmonella typhimurium
MFDAAPIKKVSVVIPVYNEQESLPELIRRTTTACESLGKAWEILLIDDGSSDSSAELMVKASQEADSHIISILLNRNYGQHAAIMAGFSHVSGDLIITLDADLQNPPEEIPRLVAKADEGFDVVGTVRQNRQDSLFRKSASKIINLLIQRTTGKAMGDYGCMLRAYRRPIIDTMLRCHERSTFIPILANIFARRATEIPVHHAEREFGDSKYSFMRLINLMYDLVTCLTTTPLRLLSLLGSVIAIGGFSLSVLLIVLRLALGPQWAAEGVFMLFAVLFTFIGAQFIGMGLLGEYIGRIYNDVRARPRYFVQQVIYPESTPFTEESHQ

SEQ ID NO: 418 - protein, 509 aa, Salmonella typhimurium
  misc_feature (4)..(4): Xaa can be any naturally occurring amino acid
  misc_feature (10)..(10): Xaa can be any naturally occurring amino acid
  misc_feature (62)..(62): Xaa can be any naturally occurring amino acid
  misc_feature (79)..(79): Xaa can be any naturally occurring amino acid
  misc_feature (81)..(81): Xaa can be any naturally occurring amino acid
  misc_feature (87)..(87): Xaa can be any naturally occurring amino acid
  misc_feature (136)..(136): Xaa can be any naturally occurring amino acid
  misc_feature (292)..(292): Xaa can be any naturally occurring amino acid
  misc_feature (310)..(310): Xaa can be any naturally occurring amino acid
  misc_feature (367)..(367): Xaa can be any naturally occurring amino acid
  misc_feature (382)..(382): Xaa can be any naturally occurring amino acid
  misc_feature (464)..(464): Xaa can be any naturally occurring amino acid
SNAXKETVTXLNQQYVVPEGLQPYQGVTANSPWLASETEKRRRKICDSLEEAIRRSGLKNGXTISFHHAFRGGDKVVNXVXAKLAEXGFRDLTLASSSLIDAHWPLIEHIKNGVVRQIYTSGLRGKLGEEISAGLXENPVQIHSHGGRVKLIQSGELNIDVAFLGVPCCDEFGNANGFSGKSRCGSLGYAQVDAQYAKCVVLLTEEWVEFPNYPASIAQDQVDLIVQVDEVGDPEKITAGAIRLSSNPRELLIARQAANVIEHSGYFCDGFSLQTGTGGASLAVTRFLEDKXRRHNITASFGLGGITGTXVDLHEKGLIKALLDTQSFDGDAARSLAQNPHHIEISTNQYANPASKGAACERLNVVXLSALEIDVNFNVNVXTGSNGVLRGASGGHSDTAAGADLTIITAPLVRGRIPCVVEKVLTTVTPGASVDVLVTDHGIAVNPARQDLLDNLRAAGVALXTIEQLQQRAEQLTGKPQPIEFTDRVVAVVRYRDGSVIDVIRQVKG

SEQ ID NO: 419 - DNA, 1053 bp, Salmonella typhimurium; identical to SEQ ID NO: 6

SEQ ID NO: 420 - DNA, 1137 bp, Salmonella typhimurium; identical to SEQ ID NO: 8

SEQ ID NO: 421 - DNA, 255 bp, Salmonella typhimurium
acttaagttagtggcagtggcagtgacttccctgttggcagcaggcgttgtaaatgcagccgaggtatataacaaagacggcaataaactggatctgtacggtaaagttcacgctcagcattatttctctgatgataacggaagtgatggtgacaaaacttacgcgcgtctgggctttaaaggcgaaacgcagatcaacgatcagttaaccggttttggccagtgggaatatgaattcaaaggcaaccgtactga

SEQ ID NO: 422 - DNA, 1422 bp, Salmonella typhimurium; identical to SEQ ID NO: 47

SEQ ID NO: 423 - DNA, 1827 bp, Salmonella typhimurium; identical to SEQ ID NO: 48

SEQ ID NO: 424 - DNA, 1209 bp, Salmonella typhimurium
tcagaattcgttgtctgtagcaggtgtgcggggcaggatgtcgtcggtgagggaccagttggtcaggatgcggcgtttccggtcgcgatctggttgtggttcatcccagataagaccgagactgagcatatcccgccgtaagccttccaccgcttcatcaacacagggttcagggcagggaagaccaaaacgcatggcttcggcctctgcacgtgcaacggccaccacgccagcgccttcaataaatcctttcgtggtattggcgcggtgtaatgcataaaacagcgtcctgtccacgcctttcagccaaatccagttgggtggcgtaagccgcaggtcatgtgcatacagccagaccagcccactgcggacgtagcgatgttgtttcagccattgctgtgctccgttgcttttaatcactctctggaaagctgatttggccagtgaataaacaggggtacagaatttcccgctgtcccgtttgcttttaattctgcatgagaggttcagtgtatccatgagctttaatgctgccttacgatcatccaggaaatactgaaggccaaatatggcaaagagcgctttttcatgtggtgccatgtctttccaggacgttaaaggtttacccaactgggccatgaaacatcgtcttgcagctgcaacatcgagctgcatattggtgatgagagtatgctgttcgacaaatgcttccggggtgagagcaacccgccgttcaggtcgtttaccaccatgaaagagtttttccggatcaccatctgccagtacaggggcgatagcaggggataacgaagcaaagatgtgtggcagtcgggtaatatctactggtctgcgggtgaaacggctttgtcccggatgttgataccactcccacaaacaccagagtgtcacaggtaagaggtacatccacagaatacctatggtctgttccatgacgttaacccactggctatagcttatgttggcggcgttgttaccggtcatggcaagcaggttgtatcgtggtgctgcatagttatgaaatggtccccagtcgaccagtccccataaggtatgaagaatcaggcagctggcgtaaaccacttccggcaagaataaccatatgacgaatagcagcaggataagaaggacaccaacagcgccccatatctgcataggatcttctgcgacaggctgtcgattgtaagacat

SEQ ID NO: 425 - DNA, 741 bp, Salmonella typhimurium
atgagaaaaaataagccgtataagccatttttactggcggccggatggttattttccggtctggtgatggcgtcgggttccggtacgctggccccggtggtggtgtccctggctaacggcggtcaggcgaacattgctgtcagcaacaccgacccgaacctgtttacggtaccgggtgaccgtatcactgcggtcagcggtctggacggcatgctgacaaacagtgagcagacaggcacgggcggcgtggtggtggccacggtcagtaaaaagccgttcaccttcattctggagacggagcgcgggctgaacttttccgtccgggccgtcccccgggccggtgccggacgcaccgtacaactggtcagcgacctgcgcggaaccggggaggaggctggcgcatgggaaacggccaccccttatgaatccctgctggttgccgtcagccaggcagttcgtggaggcacgctgcctgccggctggtatcagatccccgtcacgaaagaagcgctgcaggccccggccggtctgtctgcacgggctgacgctgtgtggaccggcaatcacctgaaactggtacggtttgctgtggaaaataaaatgccgtcagccctgaacatcagggaaagtgatttctggcagcccggaacccgcgccgtgatgttcagccagcccgtcagccagatactggccggcgcacgaatggacgtgtacgtcatccgtgacggggagggcaactga

SEQ ID NO: 426 - DNA, 2244 bp, Salmonella typhimurium; identical to SEQ ID NO: 52

SEQ ID NO: 427 - DNA, 639 bp, Salmonella typhimurium
atgcacaggaaaataaaatacctggccggactgattatggtcataagcgggacggtatcagccggcggagtcgctaatacccctgaaaaccgccagttcctgaagcagcaggaggaactgagccggcagttgcgcgaccggcctgatgctgaactgaaagcgtgggcagaccggcagattcaagcgaatcccctggtgcagtcagaccggcatttcctggatgaccttgcccgaaagcagcagacttctcaggcggataaaccggagcagggcgcggtgtactttatctcgttttccattccggaagaggggctgaagcgcatgctgggcgaaacccgtcgctacggtattccggccacgctgcggggaatgcgggataacgacctgaaagccacggcagatgccgttctgtccctggtaaaggatggggcaacagatggtgtgcagattgacccgacgctgttcacgaaatatgacatccgcagcgtaccgactctggtggtgtactgccgacagggatatgacgttatccggggcaatctgcgggtgaagcaggcgctggagaaagtggtcaccgccggggactgcaggcaggtggctgccggattacttgatggtgccggagataaaccgcaatga

SEQ ID NO: 428 - DNA, 1383 bp, Salmonella typhimurium; identical to SEQ ID NO: 50

SEQ ID NO: 429 - DNA, 741 bp, Salmonella typhimurium; identical to SEQ ID NO: 53

SEQ ID NO: 430 - DNA, 732 bp, Salmonella typhimurium
atgaaaatgaaaaaaataatgatggttacactggtcagttccactctggccctgtcagggtgtggtgcgatgagcacagcaatcaaaaagcgtaatcttgaagtgaaaacccagatgagtcagaccatctggcttgacccgtccagtgaacggacggtgtatctgcaggtgaaaaatacctccgataaggatatgagtgaccttcagagcctgattgcaaaagatattcaggcaaaagggtatactgtggttacctcaccagacaaagcatactactggattcaggccaacgtgctgaaggccgacaagatggatttgcgtgagtcccagggatggctgaaccgtggttatgaaggtgcgctctccggggcagcgctcggggccggtatcacagcgtataactctaactcagcaggtgccacgctgggagtagggcttgctgccgggcttgtggggatggccgctgatgcgatggtggaagatattaactacaccatgatcaccgacgtacagatctcagaacggacaaaagcgaccgtgacaacggacaatgttgccgccctccgccagggaacctcgggtgccaaaatccagaccagcaccgaaaccggtaatcagcataaataccagacccgtgtggtatcgaatgccaacaaggttaacctgaagtttgaagaggcaaaaccagttctggaagaacaactggccaaatcaattgcaaatattctttaa

SEQ ID NO: 431 - DNA, 549 bp, Salmonella typhimurium; identical to SEQ ID NO: 49

SEQ ID NO: 432 - DNA, 2823 bp, Salmonella typhimurium; identical to SEQ ID NO: 51

SEQ ID NO: 433 - DNA, 750 bp, Salmonella typhimurium
atgcgaaaaatacagaccgtatgggtggcagcgttactctgtggctccctgacggcatacggaaaagatgccggatggcagtggtataacgacccggtaaaattacctgacccaaaaacgacggataaatccgctcaggttcgtcaggagcctgacattatgcagaaattatctgcgctgcagaccgcaacaaagcgggcgctttatgaagccattctgtatcccggtgtggataattttgtgaaatatttccggctgcagaattactggacgcagcaggcggggcttttcagcatgagcgccaaaaaagccatgctggcgcatcctgaactggactataacctgcagtacagccactacaacggcacggtacgtaaccagctggccgcagaccaggctcagcaacggcaggccatatcaaagctggctgaacactacggtatcatgttcttttaccgcgggcaggaccccattgacggccagctggcgcaggtgattaatggctttcgcgccacttacggtctgagcgttatcccggtgaccgtggacggggtgattaacccgatgctgccggatacgcgtcctgaccaggggcaggcgcagcgtcttggtgtgaaatatttcccggccatgatgctggtagacccgaaacagggcagtgtccgtccgttgtcatacgggtttattacgcaggacgacctggcaaaacagttcctgaatgtgtcagaagattttaagccgaatttctaa

SEQ ID NO: 434 - DNA, 222 bp, Salmonella typhimurium
atgagcgatgaagccgatgaggcatattcagtgacagaacaactgaccgtgacgggaataaaccggatacggcagaaagtaaaccgtaaaggtattccggtttaccggtgtgaagcatgcggtaatcccattccggaggcgcggcgaaaaatatttcctggcgtgacgttgtgtgtcgaatgccagtcttttctggaaaaacagggcaggcattatgcataa

SEQ ID NO: 435 - DNA, 996 bp, Salmonella typhimurium; identical to SEQ ID NO: 17

SEQ ID NO: 436 - DNA, 1230 bp, Salmonella typhimurium; identical to SEQ ID NO: 4

SEQ ID NO: 437 - DNA, 1221 bp, Salmonella typhimurium
atgtttaaatcttttttcccaaagccagggccgtttttcatgtcggcgtttgtttgggcgctgatcgccgtcattttctggcaggcgggaggaggagattgggtggcgcgacttgtaggggcatccgatgaagtgcctatcagcgcagcgcgcttctggtcgctggactatctgattttttatgcttattacctgatttgcgtgggattatttgcaacgttctggttcatctatagcccgcaccgctggcagtactggtcgatacttggcacctcgctcattatttttgtcacctggtttttggtggaggttggcgtcgcggttaacgcctggtacgcgccgttctatgatttgattcaaacggcgctcagctcgccgcacaaggtcactcttggtcaattttatcatgaagtgggggtgtttctcggtattgcgcttatcgccgtggtgatcggtgtgctgaacaacttctttgtcagccactatgtatttcgctggcgtaccgcaatgaatgagcactatatggcgcactggcagtacctacgccatatcgaaggggccgcccagcgtgtgcaggaagataccatgcgttttgcctctacactggagaatatgggcgtgagttttatcaatgccatcatgacgctcatcgcctttctgccggtgttagtcaccctgtcagcgcatgtgccgaatttacccatcgtagggcatatcccttacggcctggtcattgccgccatagtctggtcattaatggggacgggcctgctggcggtcgtcgggatcaaattgccagggctggaatttaaaaatcagcgagtggaagccgcttatcgtaaggagctggtctacggtgaagatgacgccagccgcgccacgccgcccaccgtccgtgaactgtttagcgcggtgcgccataactactttcgtctctactttcactatatgtatttcaacatcgcgcgcattctctatttgcaggtcgataacgttttcggtttgttcctgctgtttccttccattgttgccggtacgattacgctggggctgatgacgcaaatcaccaacgtgtttggccaggtgcgcggttcgttccagtatttgattaactcctggacgacgctggtggagctgatgtctatttataaacgtttacgtagctttgaacgccagttggatggtcagccagttcaggaagtgacccactcttttagctaa

SEQ ID NO: 438 - DNA, 130 bp, Salmonella typhimurium
agccagccaatcttttgtatgtctgtacgtttccatttgagtatcctgaaaacgggcttttcagcatggtacgtacatattaaatagtaggagtgcatagtggcccgtatagcaggcattaacattcctg

SEQ ID NO: 439 - DNA, 360 bp, Salmonella typhimurium
gtggttaagctcgcatttcccagggagttacgtttgttaactcccgctcatttcacattcgtcttccagcaacctcaacgggctggcacgccgcaaatcaccatcctcggccgcctgaattcgctggggcatccccgtatcggtcttaccgtcgccaagaaaaacgttcgacgtgcgcatgaacgcaaccggattaaacgtctgacgcgtgaaagcttccgtctgcgccagcatgaacttcctgcaatggatttcgtggtggtggcgaaaaaaggggttgccgacctcgataaccgtgctctctcggaagcgttggaaaaattatggcgccgccactgtcgcctggctcgcgggtcctga

SEQ ID NO: 440 - DNA, 168 bp, Salmonella typhimurium
aacccggctttgttatggaataaggcggtgcctaactcgacgtttcgcccggaggttgataaagctacgctgttatcagaagttggacggcaggcaccttgttgtgcgtcattcgaagtttatgtagcgcgtccctaaggggctgacataagaaggtgaatgagccac

SEQ ID NO: 441 - DNA, 104 bp, Salmonella typhimurium
cagaggtccgcaaaagttcacgttggctttagttatttcgggttcgagagataccctctgaacgggcggtgtcttcaagggttaaacgagaaaccgctccgttc

SEQ ID NO: 442 - DNA, 219 bp, Salmonella typhimurium; identical to SEQ ID NO: 82

SEQ ID NO: 443 - DNA, 255 bp, Salmonella typhimurium; identical to SEQ ID NO: 83

SEQ ID NO: 444 - DNA, 285 bp, Salmonella typhimurium
atgtttactatcaacgcagaagtacgtaaagagcagggtaagggtgcgagccgccgcctgcgcgccgctaacaagttcccggcaatcatctacggcggttctgaagccccgattgctatcgaactggaccacgaccaggtgatgaacatgcaagctaaagctgaattctacagcgaagttctgaccctcgttgttgacggtaaagaagtaaaagttaaagctcaggctgtacagcgtcacgcttacaaaccgaagctgactcacatcgacttcgttcgcgcgtaa

SEQ ID NO: 445 - DNA, 330 bp, Salmonella typhimurium
atgtctgcacaacccgtcgatatccaaatatttggccgttcactgcgagtgaattgcccgcctgaccaaagggatgcgttgaatcaggctgcggacgatctgaatcagcggttgcaagatctgaaagttcgcactagagtcacaaatactgagcagttggttttcattgccgcattgaatatcagctatgagttaactcaggaaaaagcgaagacccgcgattacgcggcgagcatggaacaacgtattcggatgctacaacagaccatcgaacaggcgttgcttgatcaaggtcgcataaccgaaaaaacgggccaaaactttgaataa

SEQ ID NO: 446 - DNA, 309 bp, Salmonella typhimurium; identical to SEQ ID NO: 93

SEQ ID NO: 447 - DNA, 222 bp, Salmonella typhimurium
ctatgcaacggcctctgcttcgatgggcacgatgacgctggcgtgattgccttttggcccctggtggacatcaaaccggacagactgtccggctttaagcgttctgtaaccatccatttgaatggtggaataatgggcgaaaatatcctcgccgccgccttcagggcagatgaaaccaaaccctttggcattgttgaaccactttacagtacccgtttccat

SEQ ID NO: 448 - DNA, 339 bp, Salmonella typhimurium
atgacaatgaacattaccagtaaacaaatggaaattactccggcaatccgccaacatgtcgcagaccgtctcgccaaactggaaaaatggcaaactcacctgattaatcctcatatcattctgtctaaagagccacagggctttattgctgacgccaccattaatacaccgaacggacatctggtcgccagcgcaaaacacgaagatatgtacaccgctattaatgaattgatcaacaagctggaacggcagctcaataaagtgcagcacaaaggcgaagcccgtcgtgccaccgcatcggtgaaagatgccagcttcgtcgaagcagaagaagagtag

SEQ ID NO: 449 - DNA, 402 bp, Salmonella typhimurium
tcagtcctccttgctgtcgtccgggttcacacgacgttcttcgtcatgtttcaccacgttagttaccaggttggacatacgcatcccttccaccagcgagttgtcgtagaagaaggtcagttccggcacgatgcgcagacgcatcgctttacccagcaagctgcggatgaaaccagacgcttcctgcaacgctttgatgcccgcttttactgcgtcttcatctttgtcgttcaaaaaggtgacaaacactttggcataggccaggtcacgggacatttcgacaccggagacggtagtcatcatgcccaggcgcgggtctttaatttcgcgctgcaggatgattgcgatctctttttgcatctcttgcgctacgcgctgagggcgaccaaattctttcgccat

SEQ ID NO: 450 - DNA, 957 bp, Salmonella typhimurium
tcattgtactgccctgaatttgatactgtcggcaatgcgcttcgccgtttgcggcggaagctcgccgacaatggtgatttccgcgttgtcgcgaacgctgctataaaccgttcggcgcccggtgcgcagcatctgatcgctgctgttttgcgtcgcccggttcacattgacggaaaagctaaacagaccgtcagaataaagccgcgattcgataggcaggttatccatcgtcggcaacggacgacggctgctggaaacttcgctaaagccttgcggcacccaggatggactccagttaaatttcgttttttcgccaccgggaacagaaagcagcggcggcagattcgccttcgccagcgcctgcatgttgctgccgatatcctggctcaccgtgaacgcaataacgcggaactgctccagcgtctcgccatcgcgatccagcagatcaacgcgcatcggcagtttggtgtccatgtccatccagacgatatagctgtaacgcgtaccatcgcgcgccacaacgcggataacttcgcacaatctgtctgcgatacgggtgcgtccgacagaaataaagtcgtagtaaggcgccaggcgcttaaagtcggtgtaaatcagggaaggcagagaatcgacaatataatcaccgttcagggtgaacggctcaaggcccggttcaaaataactgatttcattaccacgctgtacgacctcccggcggggaccgtccaactgtagcaattgcgcaagcgggcgaccatccaggcgtgcgtgtcgataacgcagagattcaacgccttgtttcgtgatgctgacgaatgacagctcgtaattcagtgactgactggcgatgttcatctgctgcaataacgccccggacgcagggtcggccgaggcgtttgctgagaagaacaggctagccgccacaagggacatggcaaaccaaagttgcttcat

SEQ ID NO: 451 - DNA, 291 bp, Salmonella typhimurium
atggaatataaagatccgatgtttgagctgctgagcagcctggaacaaattgtttttaaagatgaaacgcgaaagatcaccctgacgcaaaaacccaatccttttaccgaatttgaacagttacggagaggaacgggactaaaaacagatgaattcgccagagcgctgggcgtaacggttgccatggttcaggaatgggaatcgaaacgcgaaaaacccacgccagcagagcttaaattaatgcgcctgatacaggcgaacccacgcttaagtaagcaattgatggagtaa

SEQ ID NO: 452 - DNA, 516 bp, Salmonella typhimurium
atgaaaaaaattgcatgtctttcagcactggccgctgttctggctttttccgcaggtactgcagtagctgctacttctaccgttaccggtggttacgctcagagcgacgcgcagggcgtagcgaataaaatgagcggtttcaacctgaagtatcgttacgagcaggacgacaacccgctgggcgtaatcggttccttcacctacaccgaaaaagatcgtactaacggtgcgggcgattacaacaaaggtcagtactacggcatcactgccggcccggcttaccgtctgaacgattgggcaagcatctacggtgtagtcggtgtgggttacggtaaattccagacgaccgattacccaacctacaaacatgacaccagcgattatggcttctcctatggcgctggtctgcaattcaacccgatggaaaatgttgctctggacttctcttacgagcagagccgtattcgtagcgttgacgttggcacctggattgctggcgtaggttaccgcttctaa

SEQ ID NO: 453 - DNA, 360 bp, Salmonella typhimurium; identical to SEQ ID NO: 439

SEQ ID NO: 454 - DNA, 414 bp, Salmonella typhimurium
atgagcgaagcacttaaaattctgaacaacatccgtactcttcgtgcgcaggcaagagaatgtactctggaaacgcttgaagaaatgctggaaaaattagaagttgtcgttaatgagcgtcgtgaagaagaaagcgctgctgctgctgaagtggaagaacgcactcgtaaactgcaacagtatcgtgaaatgttaattgccgacggcattgacccgaatgaactgctgaatagcatggctgccgctaaatccggtaccaaagctaaacgcgcagctcgtccggctaaatatagctatgttgacgaaaacggtgaaactaaaacctggactggccagggtcgtacaccggctgtaatcaaaaaagcaatggaagaacaaggtaagcaactggaagatttcctgatcaaggaataa

SEQ ID NO: 455 - DNA, 1359 bp, Salmonella typhimurium
atgatgattactctgcgcaaactcccactggcggttgctgtcgcagcgggcgtaatgtccgctcaggcaatggctgtcgatttccacggttacgcccgttccggtattggctggacgggaagcggcggcgaacaacagtgtttccaggcaacgggtgcccaaagtaaataccgtctcggtaacgaatgtgaaacctatgcggaactgaaactgggccaggaagtgtggaaagagggcgataagagcttctatttcgacaccaacgtcgcctattcggttaaccagcagaacgactgggaatcgaccgatcccgccttccgcgaagcgaacgtgcagggtaaaaacctgattgaatggctgccgggctctaccatctgggccggtaagcgcttctatcagcgtcatgacgtacacatgatcgacttctactactgggatatttcaggtcctggcgcaggtatcgaaaatatcgatctgggcttcggtaagctttcactggcggcgacccggtctactgaagcgggcggctcttacaccttcagcagccagaatatttatgatgaagtgaaagataccgctaacgacgtctttgacgtacgtctggctggtctgcaaacgaacccggacggcgtactggagctaggcgttgattacggtcgcgccaatacgaccgatggttataagctggctgatggggcatcgaaagacggctggatgttcaccgccgaacacacgcaaagcatgttgaaaggctataacaagtttgtcgtgcaatatgccaccgatgccatgaccacgcagggtaaaggccaggcgcgcggttccgacggttcttcatctttcactgaagaattgtctgatggaaccaaaattaattacgccaataaggtcatcaataataatggcaatatgtggcgtattttggatcatggcgccatctcgcttggtgataaatgggatttgatgtacgtcggtatgtaccagaatatcgattgggataataacctgggtactgagtggtggaccgtgggtgtacgtccaatgtacaagtggacgccaatcatgagcaccctgctggaagtcggctacgacaacgtgaaatctcagcagaccggcgatcgtaacaatcaatataaaatcaccctggcgcaacagtggcaggcgggcgacagcatctggtcgcgtccggctatccgtattttcgccacctacgcgaaatgggatgagaaatggggctatatcaaagacggcgataacatttcccgttatgccgcagcgactaactccggcatttccaccaacagccgtggcgatagcgatgagtggaccttcggcgcccagatggaaatctggtggtaa

SEQ ID NO: 456 - DNA, 168 bp, Salmonella typhimurium
atgaagagacaaaaacgagatcgcctggaacgggcacatcaacgtggatatcaggccggcatcgccggacgatcaaaagaaatgtgtccctatcagacgctgaatcaacggtcatactggttgggaggttggcgacaagccatggaggacagggcggtaatggcctga

SEQ ID NO: 457 - DNA, 507 bp, Salmonella typhimurium
atgtcacagactgtacatttccagggtaacccggtcaccgttgccaacgttattccgcaggctggtagcaaagcacaggcttttactcttgtcgcaaaagatttgtctgacgtttccctcagccaatatgcaggcaaacgcaaagtgctgaatattttcccaagcattgatactggcgtatgcgccgcatcagttcgtaagtttaatcaactggccacagaagtggagaataccgtcgtattgtgcgtttctgctgacctgccttttgcacagtcgcgtttttgcggcgcggaaggcctgagcaacgttattacgctttccactctgcgtaataacgagtttctgaaaaactacggcgtcgaaatcgttgacggcccgctgaaaggtttggcggcgcgcgcagtcatcgtgcttgacgaaaacgacaacgttattttcagccagttggtggatgaaatcacccacgagccggattacgacgccgcgcttaatgtcctgaaggcataa

SEQ ID NO: 458 - DNA, 315 bp, Salmonella typhimurium
atgaccaaccgtctggcgttgtccggcaccgtgtgcagggccccccttcgaaaggtcagtccatcaggaattccgcattgccagttcgtgcttgagcatcgttctgtgcaagaggaagccggctttcaccggcaggcgtggtgccaaatgcccgttattgttagcggacacgaaaaccaggccattactcacagtataacggtcggcagccgcataaccgttcaggggtttatttcttgccacaaggcaaagaacggtctgagcaaaatggttctgcatgccgagcagattgaattgatagattctggagactag

SEQ ID NO: 459 - DNA, 1215 bp, Salmonella typhimurium
ttatgaaatttttaacgccttgcgcaaaatgaacggacagacgattaaaaaagcatattccgggctaaatattgaaccggtaaaaaacagcgacaccggcgtaaaaagatagagctgcacccgaaaattgcgattatcgccaaacgcatttagcgccatttttaaaactttccccatataccacagcgtcattagcactgcgaaccaggaaaaataaataatcagtagatacaatccattgtctatggttttcccgacatccgcaccgttaaagattccgaatgatgcaacatattcataaagtgagccaaatctgactacaccatcaatatgggtcaaggaatatccgaccatgactaaggggcccacaatacgataataagaagatgagccttccgtccctaaatcgccaagtcgtgtcgcgatataaggaaatgcaataattaccccaaccaaaaacagggttaatgagaccagcgccagtggaagttttttctttatcgcatccttattcaaatattggaacgcccactccagaaggtaaaacaggataaaggtcattacccctgaaaatgatcctgataatattatccctgccagaatcatagcatcgcttttcggtgttttgataccaaactgtttgatgctcagccaaattgagattagtgccaaagcgaaaaatgccggttcaaaataaagcgcagtggtacgcttaccgccaaattttatgaagttcagtacgtagctattactgtaaatgagatatttcgaaattccttccataatactgctgccgccggtaaggataatttgcgccatctccaccgcggcgagcgcgaccaccatacccaccaccagataaaaaaaacgcaaaatctttcggtggttatgcgcggaaatggttttgaatcggatactccagaccatcccgataatgaccacaatatagacaaacagcatcgtggacgtgacatatttaccggcattcagcgactggccgaacaggaagttaaatgccgtaagccccgcgccgatgcctaaggcgatcatcaatttttttacgctaatgcgttccacaaataacagcagcaacagcggtaaaaaagtgacgatggtaatgggaaagctttcccccagttgggcaatcttgacattgaccagtaggtagatcagcggcagcagcagatagctacagattctgatagaacgagacat

SEQ ID NO: 460 - DNA, 504 bp, Salmonella typhimurium
tcataggcccaccgccggcgcgtcaggagagaagtaggcccgactgttctcatgaacattgtcgcttgccagaagctgttccggcgtcagccagcggtaactgccatgctgggcatcaggcaggcgtaaatcgctctccgccacgcgcagacgaaagccgagcacgatgtagtgagttgaaaaatcctcaccggaaaagttgtcgtcatagaagtgctgccagacgccataaaacgtccctgccgccagcggcagacgcacgcccagttccgcctgcgtcaggcgtgcaaaggcggcctccagcgtttcgtctttgcacacccgcccccccggcacaaaccagtagccctgcgccggacggttgagacgctggcccagtaaaatttccccctggccgttttccacgatgaaatcgagggagatgaggggcgtggccgcaccacggcggcgaaatcttcctgacgtaaaaacattgtcacccccggaaccgttgctgattctcaa

SEQ ID NO: 461 - DNA, 1437 bp, Salmonella typhimurium
tcagacccgcccgtaacgatcctcgaaccgcaccacgtcgtcctcttcgagatacgagccggaacgcacttcaattaaatcgagcggtatttttcccggattttccaggcagtgggtcgcccccagcggaatatagatggactcgttttcaccgagcagcttaacctcgccgttgatggtgactctggcggtccccgccaccaccacccagtgctcggcgcggtgatggtgcatctgcaccgacagtccttcccccggcttgacggtaatacgcttcacctgatagcgctcgcccgcgtcgatggagtcgtatttgccccacgggcggtaaacctcgcggtgcatgtggtgctcatggcgtccgtcggccttgatcttctccaccacctttttcacgtcctgcaccgcgtggcgatcggcaatcagcacggcgtctttggtctgcaccaccaccagatccttcacgccgacggtggtcaccaggccggattcggcgtaaacgtagctgttttccgttttatggctgatgacgtcgccgtggtggacgtttccctccggggtgtgggcgctgatttcccacagcgaggaccacgagccgacatcgctccagcccgcatccatcggcatcaccaccgcgtccgccgttcgctccatcaccgcgtagtcaatggactcttccggacaggcgaggaaggcctcttcatccacacgaatgaagtcaagatccggatcgacgccgcgcatcgcctgttcacaggcggccagaatatcggggcggaactttttcagctcttccagatagcgtccggcgcggaacagaaacatgccgctgttccagtagtaatcgccgctggcgacgtaggcctgagcggtttccagccccggcttctcaacgaactgcgccacctcaaaagccaccgcatccgtcgcgcccggcacgacatcaccgcgccggatatagccatagccggtttccggcagatccggcacgataccgaaggtcaccagtttgcccgcgtcggcatagggcatggcgccgcgcaccgcgtcgcggaaggcctcttcattggcgattgcatgatccgccgccagtaccagcatcagcggatcgcagtccgtatgctggcgcgtcgccgccagcgccgccagcgcaatcgccggcgcggtattgcgcccggcgggctcaagaataatgttctccgtcagcttattgagctggcggagctgttcggcaacgataaaacggtgctgttcgttacagatcaccagcgggctttcgcactccacgccgttcagacggcaaatggtggtttgcagcatggtgagatcgcctttcaggcacagaaactgttttggataaagcacgcgagaaagcggccacaatcggctaccggagccaccggccatcacaaccgggtaaagttttgtctgacgcat

SEQ ID NO: 462 - DNA, 966 bp, Salmonella typhimurium
tcacccccggaaccgttgctgattctcaaggaaccactggtaagtaccggcaagccctgcctccagtgaaatttcgtgataccagccaagctgatgcaggcgcgtgacgtcgagcaatttacgcggcgtgccgtccggcttcgcggcatcgaacaccacccggccctggtaacccaccacctttgcgatggtctgcgccagctcgcggatggtgcagtccacgccagtgccgacgttaatgtgcgacagcatcggggcagtgttctcctgccacacttcgcgcgccagctccatcacgtgaatactggccgccgccatatcgtcaacgtgcagaaattcacgcatcggcgtgccgctgccccacaccaccacctccggcgcgtggctctgcgcagcctcatgaaagcgacgcagcagcgccgggatcacatgtgaattgtccgggtggaaattatcatgcgggccgtacaggttggttggcatcaccgaacggtagtcgcgaccgtactgccggttgtaggactcgcacagtttaatcccggcgatcttggcgatggcgtacggctcgttggtcggctccagcgtcccctgcagcagctcgctttccgccatcggctgccttgccagtttcggatagatacaggacgaaccgagaaacagcagtttgttcacgttgtgcaggtgcgcggcgtgaataatgttgctctctatcatcatgttttcataaataaaatccgccggatacgtgttgttggcgacaatgccgcccactttcgccgccgccagataaacctggtcgatacccgccccggcaaagaacgcctgtaccgcgcgcccgtcgagcagatccagctcatcgcgggtgcgcagtaccagttccacgtcgccgcgctgcgcaagctgccgtacaatggcggagcccaccattccgcgatggcccgccacaaaaattcgttgcttattcat

SEQ ID NO: 463 - DNA, 489 bp, Salmonella typhimurium
tcatgtgctgaccttcacccgtgctttttctcccaccaccagcgcatgatccggaatactgtcaagcaccacgctacccgcgccaatcgtgacgtgattaccgatagtaatatcgccaagcaggatgacattcgcccccagctcaacgccgttaccaatcaccggacaagccaggctgtccgcgccgcgattgccaatggtgacgccgtggcgaatggtaaaatcgtcgccggcgacgacatgtttgttgatcactaccgcgtaaccatgatggatagtgaaccgccgaccaatggtcgcggcggcctggatttcatacccgaacaggcattccgtgatcacgcgatacagcaccagcaccggcgcggcccacagattattcagcacattctttttgcgccagacggaacaaaaatgagcgatacggtaggccagcaccatgcaacaggggcgtaagctccagctattcgcgcgtaagtcttccagcat

SEQ ID NO: 464 - DNA, 1008 bp, Salmonella typhimurium
atgaaaatatactcagcgctattgctggcggggaccgcgctctttttcacccatcccgcgctggcgacggtttgccgtaattcaaacgggacggcgaccgatatcttttacgacctgtcagatgttttcaccagcggcaataatcagccgggacaggtggtgacgctgccggaaaaatcaggttgggtcggcgtaaacgcgacgtgcccggcggggacaacggtgaattatacctaccgaagctatgtatcagaattaccggtacaaagtaccgaaggaaattttaaatacctcaagttgaatgactaccttctgggcgcgatgagcatcaccgatagtgtcgctggcgtattttatccgccccgtaactatattctcatgggcgtcgactataacgtgtcgcagcaaaagccgtttggcgtgcaggactcaaagctggtttttaaattaaaagtgatacggccttttattaatatggtgacgatccctcgccagacaatgtttaccgtctatgtgacgacctctaccggcgacgcgttgagcacgccggtatataccattagctacagcggcaaagtggaagtgccgcaaaactgtgaagtgaatgccggacaggtcgtggagtttgatttcggcgatatcggcgcgtcgttatttagtcaggcgggggcgggtaatcgtccgcaaggcgtcacgccgcaaacgaaaaccattgctatcaaatgtaccaacgtcgcggcgcaggcctatttatcgatgcggcttgaagccgaaaaggcctcagggcaggcgatggtgtccgataatccggatttaggctttgtggttgctaatagcaacggtacgccgcttacacccaataatttgtcgagtaaaattccgtttcatcttgatgataacgccgccgctcgcgtaggtattcgcgcctggccaatcagcgtgacggggattaaaccggcggaagggccgtttactgcgcgcggctatctacgagtcgattatgattaa

SEQ ID NO: 465 - DNA, 408 bp, Salmonella typhimurium
atgtacaccgcgagcggtatcaaagcttatgcgcaagtcagcgtggaaagcgccgtgatgagcgccagcccgcatcagttgattgaaatgttgtttgatggcgcgaatagcgctctggtgcgcgctcgcctgtttttagaacaaggcgatgttgtcgcgaaaggtgaagcgttaagcaaagccatcaatattatcgataacgggctgaaagccggcctcgatcaggaaaaaggcggtgagattgcgacgaatctttccgagctatacgactatatgattcgccgtttactgcaggctaatttgcgtaacgacgctcaggccatcgaagaagtggaagggttactcagcaatattgcagaagcctggaagcagatttcaccgaaagcatctttccaggagtctcgttaa

SEQ ID NO: 466 - DNA, 294 bp, Salmonella typhimurium
ttatttactctgtaagtagctctgcgcctcgcgaatgagcgagtctgctatttttcccgtatccatttttaactcaccgttacggatagccgtttttaatgcttcgacgcgttccatattaatgtcgctgacgcctggctgcatgagcttcgcttgcgcgtcgcttaacgttacgctggcgctcgtcgcggcggacgttttttcctgacgcgttttttgtaccggcgtgtcgctggtttcgcgcgtctggacagtgctaacgggtttcaaaggtgaggtacggtcaatgctcat

SEQ ID NO: 467 - DNA, 351 bp, Salmonella typhimurium; identical to SEQ ID NO: 77

SEQ ID NO: 468 - DNA, 315 bp, Salmonella typhimurium
ttaaacctgcatggacatgacttcctgatacgcggcgaccagcttgttgcgcacctgaatccccatttgcatagagacggacgctttttgcatatcggccatcacgtcattaagcgcaatgcccggctcacccagagtgaatttttccgcctgaacgcgcgccgccgcttgtctgtcgctaatacgatccagcgcagcatgtagctggccggcaaaactcaccgtcgactgcgagtgcgtgtcttgcccgcgcgcggccatcgccgtcgcctgtaactggctaataaccccttcaatcccctgtattgctgccat

SEQ ID NO: 469 - DNA, 369 bp, Salmonella typhimurium; identical to SEQ ID NO: 78

SEQ ID NO: 470 - DNA, 645 bp, Salmonella typhimurium
ttaaaagccaagactgtccagcaggtcgtccacctgatcctgactggcaacgacgccagctttcgaggtatccacctgcgggccgttgagcaagctttcgttctcgcgttttggtcgcgcgctctgttccgggatgttttccagcagcaccattaacaactggcgttcaatctcctgaatcacgtccatcatgcgtttgatcacctgacccgtcagatcctggaaatcctgcgccatcatgatgtccagcagttgcgcgttagtaaagctggtatggcccgggacatccctgagaaactggcgcgtatccgtcaccagttcacgggcgtcggaaagctcgatcggattgtcaaaccactcgtcccaacgttgggttagcgctttcgcctctttttccatcgcatcctgatgcggctgcgaggcttcgacactgtttagcgcgcgttccgccgcctgcgccgtcatctggacgacataatccagacggtcgcgcgcatcagggatcgcctccgccgcttcggcaatcgcctggtccagccccagttcacgcaggctgtcgcgcagcattcgggtcagactaccgatgcgcgcaatgatgtctcctgctgagccttcatcagcaggcttgatagatggttgcatcat

SEQ ID NO: 471 - DNA, 245 bp, Salmonella typhimurium
gccccctcttcggaggggcggttatcttgtcggagtgctaattttccacaaaagcgttcgtgatgcgtcaaggcggcaagtcggtgaatctccaggagcttacataagtaagtgactggagtgagcggacgaagccaacgaagaggcagcgcgaaggatgaagtggaaaaggctgagaccgttaattcgggatccgcggaacctgatcaggttaatacctgcgaagggaacaagagtaattctgc

SEQ ID NO: 472 - DNA, 954 bp, Salmonella typhimurium
atgacggacaaattgacctcccttcgtcagttcaccaccgtagtggctgataccggagatatcgcggcaatgaaactgtatcagccgcaggatgctacaactaacccttctctcattcttaacgcagcgcaaatcccggaatatcgtaagctgattgacgatgctgtcgcctgggcgaaacagcagagcagcgaccgcgcgcagcaggttgttgacgcgaccgataagctggcggtgaatattggcctggagatcctgaagctggtgccggggcgtatttctaccgaagttgacgcgcgtctgtcttatgacactgaagcgtctatcgccaaagcaaaacgtatcattaaactctacaatgatgcgggtatcagcaacgatcgtatcctgatcaagctggcgtccacctggcagggcattcgtgcagccgaacagctggaaaaagaaggcatcaactgtaacctgacgctgctgttctccttcgcgcaggcgcgtgcgtgcgccgaagcgggcgtctacctgatctcgccgttcgtaggtcgtattcttgactggtataaagccaataccgacaagaaagactatgcgccagctgaagatccgggcgtggtttccgtaacggaaatctacgagtactacaaacagcatggttacgaaaccgtcgttatgggcgcaagcttccgtaacgtaggcgaaattctggagctggcgggctgcgaccgtctgactatcgcgccggcattgctgaaagaactggcggaaagcgaaggggcgattgagcgtaagctctctttctccggcgaagtcaaagcgcgcccggaacgcattaccgaagccgagttcctgtggcagcatcaccaggaccccatggcggttgacaaactggcggatggtatccgtaagtttgcggtagaccaggaaaaactggaaaaaatgatcggcgatctgctgtaa

SEQ ID NO: 473 - DNA, 192 bp, Salmonella typhimurium
atgccaaccagaccaccttatccgcgggaagcttatatcgtcaccattgaaaaaggcacgccgggccagacggtgacgtggtatcagctacgggctgaccatccgaaacctgattcgctcatcagcgagcatccgaccgcagaagaagcgatggatgcgaaaaatcgttacgaagatccggataaatcatag

SEQ ID NO: 474 - DNA, 255 bp, Salmonella typhimurium
ctaatggcgacgatactcgttttcctggtaatcgcctgattctattttggcgatgccggcttctaatattgaaataaattgcctggctacatctgttgttaaccagagcgtttgaccaacttcagtcccttccggttccggacgatttggggtctggtagtgtaaacgcagcatcagcgcatcatagctatcgacggtgctgatgtcccatcctacaagcggatgggtctgaatgacttcattattcttttccat

SEQ ID NO: 475 - DNA, 369 bp, Salmonella typhimurium
atggaattgcattcagacacgtttaacccggaggacttcccctggcaagggctgacgctaacgccagcggcggcagcgcacatacgtgaactggcagaaaagcagccgggcatgttgggcgtgcggttaagcgtaaaacagacgggatgtgccggatttggctatgttctggataccgttcgggagccggataaagacgatctggtttttgaagccgaaggcgcaaagcttttcgcaccgttacaggcgatgccttttattgacggaacagaagtggattacgtacaggaagggctgaaccagttatttaaatttcataaccccaaagcccagaatgaatgcggctgcggcgaaagttttggggtatag

SEQ ID NO: 476 - DNA, 747 bp, Salmonella typhimurium
atgttaagcattaaagatttacaggtcagtgtggaagaaaaagcgattttgcgtggcctgaatctggagattcgccccggcgaagttcatgccattatggggccgaacggttccgggaaaagcacgctctccgccaccctggcgggacgtgaagattatgaggtcaccggcggctcggttacgttcaaaggtaaagatctgcttgaactgtcgccggaggaacgggcgggtgaagggatttttatggccttccagtacccggtagaaatccccggcgtcagtaaccagtttttcctgcaaaccgcgctgaatgccgtgcgcgcctaccgcgggcaggcgtcgttggatcgctttgattttcaggatctgatggaagaaaagatcgcattgctgaaaatgccggaagatttactgacccgttcggtaaacgtcggtttttccggcggggagaaaaagcgcaatgatattttgcaaatggcggtgctggagccggaactgtgcatccttgatgagtcggactccggactggatatcgatgcgttgaaaattgtggcggaaggcgtcaacgcgttacgcgacgataaacgcgcttttattatcgtgacccactatcagcgcatactggactacatcaagcccgattacgtccacgtcctctatcaggggcgaattgtccgttccggcgattttactctggtcaaacaactggaggagcagggttatggctggcttaccgaacagcagtaa

SEQ ID NO: 477 - DNA, 417 bp, Salmonella typhimurium
atggctgcgctaccggataaagaaaaactgctgcgtaactttacgcgttgcgctaattgggaagagaaatatttatatattattgagttggggcagcgcctggcggagttaaatccgcaggatcgtaatccgcaaaatacgattcatggctgtcagagccaggtgtggatcgtgatgcggcgaaacgccaacggcattatcgaattgcagggcgacagcgacgcggcgatcgttaagggccttatggcggtggtatttattttgtaccaccaaatgacggcgcaggatattgtgcattttgatgtccggccatggttcgaaaaaatggcgcttgcgcagcacctcacaccttctcgttctcaggggctggaagcaatgattcgcgcaattcgcgctaaggccgccactcttagctaa

SEQ ID NO: 478 - DNA, 1596 bp, Salmonella typhimurium
atggctgatattctgctgctcgataacatcgactcgtttacctggaacctggcagatcagctacggaccaacggtcataacgtggtgatttaccgtaaccatattccggcgcagacgcttatcgatcgcctggcgacaatgaaaaatccggtgctaatgctctcccccggtccgggcgttcccagcgaggcaggctgtatgccggagctgctgacccgactacgcggcaagttaccgatcatcggcatttgtctggggcatcaggcgattgtcgaagcttacggcggttatgtcggtcaggcgggagaaatcctgcatggcaaagcctccagcattgagcatgacggtcaggcgatgttcgccgggctggcgaatccgctaccggtcgcgcgttatcattcgctggtcggcagtaatgttcctgccgggctgaccattaacgcccatttcaacggcatggtgatggcggtacgtcatgatgcggatcgcgtttgcggttttcaatttcatcctgagtccatcctgacgacacagggcgcgcgtctactggagcaaacattagcctgggcgcagcaaaagctggaaccgaccaacaccctacagccgattctggagaaactctatcaggcgcaaacactgacgcaacaagagagccatcagttgttttcggcggtcgtccgcggcgaacttaagcctgaacagctcgccgccgcgctggtgagcatgaaaattcgcggcgagcatcccaatgaaattgccggcgccgccactgcgttactggaaaatgccgccccgttcccgcgcccggagtatctgtttgcggatatcgttggtaccggcggcgatggcagtaacagtatcaatatctctaccgccagcgcctttgtcgcggcggcctgtggactgaaagtggcgaaacacggcaaccgtagcgtgtccagcaaatcggggtcatccgatctgctggcggcgttcggtattaatctggatatgaacgccgataaatcacgtcaggcgttagatgaactgggcgtctgtttcctgtttgcgccgaaatatcacaccggactccgtcacgcgatgccggttcgccaacagttaaaaacgcgaaccctgttcaacgtactcggcccgctgatcaacccggcgcatccgccgctggcgttgattggcgtctatagcccggaactggtgctgccgattgcggaaaccttacgggtactgggctatcagcgcgcggcggtggtacatagcggcggcatggatgaggtttcgctccatgcgccgacgattgtcgcggagctgcatgatggcgaaattaaaagctatcaacttacggcggaggattttggcctgacgccttaccatcaggatcagttggctggcggcacgccggaagaaaaccgtgacattctgacgcggttattacaaggtaaaggcgatgccgcgcatgaggccgccgtcgccgccaacgtggcgatgctgatgcgtctgcatggtcaggaagatctcaaggccaacgcgcaaaccgtgcttgatgttctgcgcaacggcaccgcatatgacagagtcaccgcactggcggcaagagggtaa

SEQ ID NO: 479 - DNA, 993 bp, Salmonella typhimurium
ttactcgcggaacagcgcttcgatattcagcccctgcgtctgcagaatttcgcgcagacggcgcaggccttcaacctgaatctgacgaacacgttcacgcgtaagaccgatttcacggcctacatcttccagtgtcgcagcttcatatcccagcagaccgaaacggcgcgccagcacttcacgctgtttggcgttcagttcgaacaaccatttgacgatgctctgtttcatatcgtcatcttgcgtggtgtcttccggaccgttctctttttcatcggccaggatgtccagcaacgctttttcggaatcaccgcccagcggggtgtctaccgaggtaatgcgctcgttgagacgaagcatacggctgacgtcatcaaccggtttatccagttgctctgcaatttcttccgcactcggttcgtggtccagtttatgcgacaactcacgtgcggtgcgcaggtatacgttcagctctttaacaatgtgaatcggcaagcgaatcgtacgggtttggttcatgatcgcccgttcgattgtctggcgaatccaccaggttgcgtatgttgagaagcggaacccgcgttccgggtcaaacttctcgactgcacggataagccccaggttgccctcttcaatcaggtccagcaacgccagtccacgattgccataacggcgggcaatttttaccaccagacgcaggttactctcaatcatgcgacggcgagaagcgacatctccacgcagtgcgcgacgcgcaaaatagacttcttcttcggctgttaacagtggtgaatacccaatctcaccaaggtaaagctgagtcgcgtccaacacacgctgtgtggccccttgcgataacagctcttcttcagccaggtcgttatcactgggttcctcttcactcaaggctttttcgtcaaaagcctctactccgttctcatcaaattccgcgtcttcatttaaatcatgaactttcagcgtattctgactcaa

SEQ ID NO: 480 - DNA, 228 bp, Salmonella typhimurium
tcatttatccgccagctccctgagctcattgccatgaaccgccataatggcagcaaactcatcatccattcgcgccgtctgataacgctcaaactcctcggcgctgatgatcactgcggacttatgcccacgacgcgtgatggtaacaggcccccccgtcaccgcactttccaggacttcggccagattttgccgcgcttcgctatagttaaccgtacgcataaacat

SEQ ID NO: 481 - DNA, 414 bp, Salmonella typhimurium
tcagttaatttcgatacggcgcggtttgttcgcttccggaatcacgcgctccagttcgatatacagcagcccgttgaccaggtttgcgccgcgaacgtgaatgttctccgctaactggaacttacgttcaaagttacgctcggcaatgccctgatacaggtaagtacgttctttctgctcgtccgcatgagcgccttttaccaccagtaaattatcctgggcagtaatctccagttcgctttccgcgaaaccggcaacggcaatggcgatgcggtagtggttttcgtctaccagctcaacgttgtacggagggtagccgccattactttggctttggttattttcaagcaggttaaacagacgatcaaaaccaatggcagaacggtacagcggggataaatcaaagttacgcat

SEQ ID NO: 482 - DNA, 201 bp, Salmonella typhimurium
tcaaccccctgcaataacctgaaaaaacaggatctggtcgccttcctgcacgatttgctgctgccactgctcgcgcggcaggatctgctgattgagcgccagcgccgcgcccggtttaagctgattgagttgcgtgagcagctcactgacggtttgccctgcggcgcactgcatcggttcatcattgaactgaatctgcat

SEQ ID NO: 483 - DNA, 876 bp, Salmonella typhimurium
ttattgcagttgcacacttattaacactgtgcccgaacttgtatgtcctggtcgtattgttcctggcgcaagaacaagtttacattcatctccagcacgcattgtcgtgcactgacctccagtagtttttaacaattgtgcatttctggccacttcgctgggagttatcgactgtgttacacgaatagaagcaccaggagtcccactagcctttagtatcacttgctcgaacgcaccatttaccccagccttgctgtttatcgaatctggatgctcaacggtaatactttttgtcgtacctcctgcaggaaagcttgtcgacattacaccattaccgagggtataacgtgctccagatgaagaagtgagtgtgacgctcggtgatggtaagtgatattggtgaagccacgatcccagcgaactggcctcacattcatcatatagggttctagtcgtacggacttctcctgttcggctgagactaaacatcaacgtatagccagcggggagtatatacccttcacccgcaacaatgccattctgaaccaggcccggggcccgaaacattacgccgaaacccttatctgcaaccttgcactcaacttctgcgggatatcgtgttccatcgggtgctataaccatagctgttccattacaggtacgcgatataatttgtacgttgcactgactgaatgaagtcattgttaccatagaaagggctgcttggtctgacttaatcataaagttacttgcctgcatttggtattggtagattccttgactatatgtggatacagttgtggtttttgcatgagcagggtaagtgatgaccgttccccccatgatgatgactgaagcaattagtaattttaacat

SEQ ID NO: 484 - DNA, 255 bp, Salmonella typhimurium
cggggagacgggcggaggggaggaaagtccgggctccatagggcagggtgccaggtaacgcctgggggggaaacccacgaccagtgcaacagagagcaaaccgccgatggcccacgtaagtgggatcaggtaagggtgaaagggtgcggtaagagcgcaccgcgcggctggtaacagtccgtggcacggtaaactccacccggagcaaggccaaataggggttcataaggtacggcccgtactgaacccgggtag

SEQ ID NO: 485 - DNA, 417 bp, Salmonella typhimurium
atgatgaaagagaccgatattgctgatgttttgacgtccactcgcactatcgcgctggtaggtgcgagcgataaacccgatcgtccaagttatcgggtaatgaaatacctgcttgaacagggctaccatgtgattccggttgcgccaaaagtcgcgggtaagacattgctggggcaacaggggtatgccacgctggcggacattcccgaaaaagtcgatatggtggatgtttttcgcaactctgaagctgcatggggcgtcgcgcaggaagctatcgccatcggcgcaaaaacgctatggctacagcttggcgtgatcaacgaacaggcggcggtgctggcgcgggatgcaggcatgaccgtggtgatggatcgctgcccggcgattgagatccctcgcctggggctggcgaaataa

SEQ ID NO: 486 - DNA, 648 bp, Salmonella typhimurium
ttagatagccattgaggagagtaaattaatttgcgtctgctttgccatattatcgcgatagtccgcgacttttgtcggccagtggataccggcgaccagcgtcagattacgcagaagcggaaacagatgaatatcatcttccgataattcgccgttaacggcgttaggctgtacgatgagtttatccagcaaacgtaaatcatcgccgatctttttaatcagtcctgcagagtgcgcaagatggttgtcaaaactgccagatgaggcttcttttttgcggataaaatactgacgcgccgcaggggtagaaaattcatcgaaagcggattttgcaaatcgcggcagcagtagctgattaacgtaaccgttaactttgcgcaaccactcttcaatggctggattgcgtttcccggttaacagcggtttgccgtcgaggttgtcgacataatgtacaatatccatactttcaggaaggtagcgactatcatctttttgcaggatgggcaccatcttttgaccaatcatccgggtgggcgtcgcctcgtcgtcattttgtaacacgttaagttcaacggggatgttcttcaggccgaaaatcatgcgggctttaacgcagaaagggcaatgatcgtaaatataaagcttcac

SEQ ID NO: 487 - DNA, 660 bp, Salmonella typhimurium
ttataggttaataagaatattcccatcagaatcgacggttccactcacgatttgacccgatgtcatgcgcacgcgcgcattttgcgcgacggcagcattattcatcgcctgaccttccgcattgacgctgaacccctcgccattggcgatgacctgtactcgttgccccgctttgacgcgccaggcctgacgtatcatcgtaagctgtaccggctgcccgggagcgagatcgcgcaaactgacggcatcctgaatctgacggatatccagtaccgtccgcggcggtaactgatccagcctgccacgttttagcgtgacgttggccggcgtcaattttccgccgcgcgcgatgggcgcggcaacggcgacataattgccggtcgcttgcacattcacctgcaaataacgtttttcattggcgcagcgcgccaccacattgacgttgccccacagcttcgcgctgcccgtcatgctgaaggctggctgttcgcagctcggtagcagattgggcgatgaacggagcgtgacaaccacctcgtcgctgaagccagccagacgctgggaaaaccacgtggtcagctgggcgttgatgtcctgcgccattgtcagggggctgaacagcaaagccgccacggcgaatcctcgttttaacgtttgcat

SEQ ID NO: 488 - DNA, 405 bp, Salmonella typhimurium
gtggcgctgttaaacatttttgatattgccggatcggcgcttgccgcacagtccaaacggttgaacgttgcggccagtaacctggcgaatgcggatagcgtcaccggcccggacggacagccttatcgcgccaaacaggtggtttttcaggtggacgccgcgccgggtcaagccactggcggggtaaaggtcgccagcgtgattgaaagtcaggcaccggaaaagctggtttatgagccaggcaatccgctggcggacgctaatggttacgtcaaaatgcccaacgtcgatgtggtcggcgaaatggtcaacacgatgtcagcctcgcgcagctatcaggcaaatatcgaagtcctgaataccgtaaaaagcatgatgcttaaaacgctgacattaggccagtaa

SEQ ID NO: 489 - DNA, 756 bp, Salmonella typhimurium
atggatcacgcaatttataccgccatgggggcggccagccagacgcttaaccagcaggcggtaacggccagcaacctggctaatgcctcaacgccgggctttcgcgcgcagcttaacgcgctacgcgcggtgcccgttgatggcctctctttagcaacgcgcacgctggttacggcgtcgacgccgggggcggatatgaccccgggtcagttggactacacctcccgtccgctggatgtcgcgttacagcaggacggctggctggtagtgcaagcggcggatggcgctgaaggatatacccgtaacgggaatatccaggtgggtccgaccgggcagttaaccattcagggacatccggttatcggcgaaggcggcccgattaccgttcctgaagggtcggaaatcaccattgcggcagacggcacgatctccgcgctcaatcccggcgacccgccaaacacggtggcgcccgttgggcgactgaagctggtcaaagcggaaggcaatgaggtgcagcggagcgatgacggtttattccgccttaccgccgaggcacaggctgaacgcggggcggtactggccgccgacccgtcaattcgcattatgtcgggcgtgctggagggcagtaacgtcaagccggttgaagccatgaccgacatgatcgccaacgcacgtcgttttgaaatgcagatgaaggttatcaccagcgtagatgagaacgaagggcgagctaaccaactgctgtcgatgagttaa

SEQ ID NO: 490 - DNA, 783 bp, Salmonella typhimurium
atgatcagttcattatggatcgccaaaaccggtctggacgcgcagcaaaccaatatggatgtgattgccaataacctggcaaacgtcagcaccaatggttttaagcgtcagcgcgcggtatttgaagatctgttgtatcagaccatccgccagccgggcgcgcagtcgtccgagcagacgacgctgccttcagggctgcaaatcggtaccggcgtgcgtccggtcgccacggagcgtctgcacagtcaggggaacctgtcgcagaccaacaacagtaaagatgtggcgattaaagggcagggctttttccaggtcatgctgccggacggtacgtctgcttatacccgcgacggctctttccaggtggatcagaatggtcaactggtgacggcgggcggttttcaggtgcagccggcaatcaccattccggccaacgcgttaagcatcacgattggccgcgacggcgtggtcagcgttacccagcaggggcaggccgcgccggttcaggtcgggcagcttaacctgaccacctttatgaacgacaccgggctggaaagcattggcgagaacctctatatcgaaacgcaatcgtccggcgcgccgaacgaaagcacgccggggctcaacggcgcggggttgttgtatcaagggtatgtcgaaacgtcgaacgttaacgtggcggaagagctggtgaacatgattcaggttcaacgcgcctatgaaattaacagtaaagcagtatcgacgaccgatcagatgctgcagaaactgacgcaactctaa

SEQ ID NO: 491 - DNA, 1509 bp, Salmonella typhimurium
ttattgttgaggcagcgccggaacgtccggaacggaaagcgccggcatcccaaacaggccgacaaagtcttccaacggcattttttgtccgttgagcgtgatctggccattggcgtactgcaaactggaggcgatagtattatccttcagcgttgtcagtcggaacatctgacccattgcggacagcccctgcacctgctgttttgccagtttttccgcatcatcctgctgatagccttccagttttgctatctgcgtcataaactcgaccgccatgtccattggaattgccagtttcgcatccagcgatttcacggagcggtcgacttcctgcgccagcgtttgtggttgtgccgttgtggttgccggatctttgaggaacagcgacagattcagcgtggtttcccctttggcgtttttccagctaagcggcgccagagtcagtaccggatcgccttttaacagcacggggagagcgctaaagaacgcttcggtgactttttgctgataaagctcaggattctgcgccacgtccggctgattcagcagcgcctgcgtttgcgcatgatattgctgactaaactggtgccaggcttcgccgtcgatttggccgactttcagcgttaatttaccgctgcccaaatcctgattctgcactttcaggctgttaagcgagtaatccaactggctgttaatggtttttccgtcgttgacgagatcggacttgccggtaatttccatcccttccagcaccgccatctctttaccctcaatggcgatggacagtttatccagcgttaacttttggtcgcccacacgttcgccaaagcttgccagtttactggtaccgtcggttttcaaattattaaaggtgagttggaccttctgattatattcgttaacggcatcgaccaggccgctctgcgcttcgcctgacagcgaaaccacattaccgtctttatcggcgttaagctggaactcgccgccgctaaaggcgaccttttcaccggcattctcgtagtttaacggcttgagagagatatcggagcgggtatcgccgccataaccaatgcgggtattgataacaaagggcgcgtcgcctttcgcaatatcaaagaggggttttgccgcatcgttattcaccagagtggtttttaccgacgccatagaagggatcagattgagcgttttgagctgggcgagcgggaaggggccatgtgaaacggactcgtccagcacaatgctttgcccgggcttcaaccaggtattgtctgcgccggcaaccggtttgacaaccagttgcagatggctactgaacacgccgcgctggtagttttgataacttaattcgacaccggcctccggcgcagtacgcttgagctgttcattggcctgagtcaccatttctgcaagatggttctccagctttttccccgtataccaggcgccgcctgtccagacgatgccaagtgcaattactacacctgcagctaccagtgtttttttcat

SEQ ID NO: 492 - DNA, 1005 bp, Salmonella typhimurium
atgggcgatagtattctttctcaggctgaaatcgatgcgctgttgaacggcgacagcgacaccaaagacgaacccactcccggtatcgcaagcgatagcgatattcgcccttacgatcccaatacccagcgtcgcgtcgtgcgtgaacgcttgcaggcgctggagattattaacgagcgtttcgcacgccagttccggatgggattatttaacctgctgcgccgcagcccggatattaccgtgggtgccatacgtattcagccgtatcacgaatttgcgcgtaacctgccggtaccgaccaacctgaacctgatccacctgaagccgctacgcggcaccgggctggtggtgttctcgccgagtctggtgtttattgccgtcgataacctgttcggcggcgacggccgttttccgaccaaagtcgagggccgcgagtttacccatacggaacagcgtgtcatcaaccgtatgctgaaactggcgctggaaggctatagcgacgcatggaaagccattaatccgctggaagtggagtatgtgcgttccgaaatgcaggtgaaatttaccaatatcaccacctcgccgaacgatatcgtcgtcaatacgccgtttcatgtggagatcggcaatctgaccggtgaatttaacatctgtctgccatttagcatgatcgagccgctgcgtgagctgctggtgaatccgccgctggaaaactcgcgccatgaagatcagaactggcgtgataacctggtgcgccaggttcagcactctgaactggagctggtggccaattttgccgatattccgttacgtctttcccagattttgaagctgaaacccggcgatgtactgccgattgaaaaacccgaccgcattattgctcatgtggacggcgttccggtactcaccagccaatatggcaccgtaaacggacagtatgcgctacgcgtagaacatttgatcaacccaattttgaattcgctgaatgaggaacagcccaaatga

SEQ ID NO: 493 - DNA, 1521 bp, Salmonella typhimurium
ttaacgtaacagagacagcacgttctgcgggacctggttagcctgcgccagaacggaagtaccggcctgctgcagaatctgcgcgcgagacatgttggaaacttcggtcgcgtagtcggaatcttcgatacggctacgcgcttcagacagattgtttacggtattgcccaggttggtgatagcagagttgaaacggttttgtaccgcacccagatcagagcgcagcgcatccacctgcgccagcgcggcatcaattttctgcagcgggttttcggtggttttagcggctgcttccgccagctctggttgtgctttgaaatcatgaccagcggctttgctggcattgtaggttttaccgtcgatagtaacgacttcggttttaccgtctacgccacccagttggttagccgctgttttggtagtgccgtcagcagcagtataacttgtagttttagctttaattgctcctgtcgcttcatcgtaatctgcggcgtaatacttatcgccagctttaagcgcataaccgccttcaattgtcttaccatttttatcggtataagacattttgaccaactcagcgccattagcatcggtagcgtcaacgccgccagcaattaaggcatttttagcatctgctgaaacaactgccggtgtatcttttaactcctgtacttctgttttagttgtcgcaccagcaggcattgtggttttagttgcgccagccgcaagggttactgtaccgtcagtagcaacgttaacttcataatcgccatttttggcggcatcagcaccagtaaagccaccaatagtaacaaagtacttgttattatctgcgtcaaatttaaccgcaccaccggttacagaagccgtaccattcgtaccacccgtagccgctttaatagctgcatcatcaagacccgatacatccagtgtagtaccattattggcataagctttcgttgttactgctgtatctttcacatcatacgctttctgcacgttcagtgagtccagacccagggtctgagagttgatctgcttcagatcgatatcgatagtttcaccgtcgttggcgccaacctggatggtcagggtgttgtcctgcgccaggactttcacgccgttgaactgagtctggccggatacacggtcgatttcgttcaggcgctgggtgatttcagcctggatggagtcgaggtcagactgggagttggtgctgttagcagactgaaccgccagttcacgcacacgctgcaggttgttgttgatttcgttcagcgcgccttcagtggtctgcgcaatggagataccgtcgttagcgttacgggaagcctgagtcagacctttgatgttcgcggtgaaacggttagcaatcgcctgacctgccgcatcgtctttcgcgctgttgatacgcagaccagaagacagacgctcgatagcggtgcccagtgcggactgggatttgttcaggttattctgggtcagcagcgacagactgttagtgttgattacttgtgccat

SEQ ID NO: 494 - DNA, 543 bp, Salmonella typhimurium
ttagctgacctctttcatatggcgagtcagttcaatacggtcggacggcaccaggcatttctgacgcttacagtccgggcaggtctcaaagctttcgcggtggttttccgcgcggctgtcgccgttgtgcgcaagcagcgcaatggcgtagtcgatctctttctgtaccgcgaaaggacgattgcacacgcggcagttgcacagcgcaaagcgggactgttgcaggaaatcttctttcttccacaccgccagttcgtactcttgcgacagtttaatcgccgccgtcgggcacacctcttcgcagcgaccgcagaagatacaacggccaagattgaactgccacgccagctcattggtcgcgagatcggtttccaccgtcagcgcgttcgacgggcaggcattaacgcaggcggcgcagccgatgcactgctgcggattatgttccggcttgccgcggaagtttttatcaaccgcaatcggctccagcggataagacgaggtcgccgtgccggttttgataacttttttgataaaggtaaacat

SEQ ID NO: 495 - DNA, 924 bp, Salmonella typhimurium
tcacgccgccagcaaggagacgaaggctaaaaacgcaaacccaaaaccggcccaggtcacgcgtgaagtggcgcaaaaacgcagtcgcgccatgctgttttcaaacagggcgatcaccagtacgccaacaatcagcttgacgacggcaatcaccagcgccagcagcagtccgcctgcgctgaaggtttccatctgtccccacggcagaaacacgccgacgaacatttgcaacaccaccagttgtttaaggctgatgccccatttcaacaccgcaaagccgctaccgctgtattcggtcaacggcccttcctgcaactcctgctccgcttccgccaggtcgaacggcagcttgcccatttcgataaaggtggcgaaggcgcaggcgcacagcgccagaatcagcggaatactgcgcgcgacaggccagtgataaatggtatcggcgatattgctgatatgagttgaacccgccacctgcgcggcgacccacagacccagcagcagaatcggctccaccagcacgccgagcatcgcttcacggctggcgccgatcgcggtgaacgggctgccggtatccaggcctgcaatagagaagaagaagcgcgcgatggcgaacaggtaaatcagggtgattaaatcacccagttgcggcaacggagatccaacggtgacgaccggcagcgcggtggcgatagtcagcatcacgccgaccatcacaaacggcgtcaggcgaaaaacccagccagaatcagcgggcgcaatactctgacgaccgagcagtttgataatgtcgcggtactcctgcaacacgcccggccctcggcgattgtgtagacgggcgcgcaccacgcgagtaataccggacagcaatggcgcaacggcaaatagcaccagcgcctgaattaacggataaaacacactcat

SEQ ID NO: 496 - DNA, 609 bp, Salmonella typhimurium
ttatgcatccccactctgagcctgctgaaacaaggtgagatcgccaaaatcggtattaaacgtcagctcacgtttacgtttgctggcgcgggcgatatccgtgttctccaccaggtgtagcgctttagtcgggcacatccgcacacaggccgggccttgctcgtcaaagctgcacaggtcgcatttcaccgcgatagcgcgtacgcccggcacccagtcgagcaacgtactgacgcgcgcaggcgctggcggcgcgggcggcgctttcggcgtattggcgttcgccggaatatgcagcggacggctgccggaaaactcaatagcgccaaacggacaggcaataccacacagtttgcagctcacgcacaggctttcattaagctggacagcgccgtcaacgcgattaatcgcgttaaccgggcataccgtggcgcatggcgcatcttcacagtggtgacaaagctgcggcgcagattctttttcattcagcatcactttcaggcgcggcattgactgcaggccatgctggcgatgcgtctctgaacaggcggcctcacaggtgtggcagccgatacagagagtggagtcagcaattacaaaacgattcac

SEQ ID NO: 497 - DNA, 990 bp, Salmonella typhimurium
atgaaaaagtggggcgtgggattcacattattgctggcgtcaaccagcattctggcaaaggatattcagttacttaacgtatcgtacgatccaacgcgtgagctgtacgagcagtacaacaaagcgtttagcgcgcactggaagcaggaaaccggcgacaacgtcgtgatccgccaatcgcacggcggttcgggtaaacaggcgacttccgttattaacggcattgaagccgatgtcgtgacgctggcgctggcttacgatgtggacgctattgcggaacgtggtcgtatcgataaaaactggattaagcgtctgccggataactcagcaccttacacctccaccatcgttttcctggtccgtaaaggcaatccaaaacaaattcatgactggaacgatctgattaaacccggtgtgtcggtgattacgccaaacccgaaaagctctggcggcgcacgctggaactatctggcggcatggggctacgccctgcaccacaacaataacgatcaggccaaagcgcaggactttgtcaaagccctgtttaaaaacgttgaagtgctggactccggcgcgcgcggctcaaccaatactttcgttgaacgcggtatcggtgatgtgctgattgcctgggaaaacgaagcgctactggcgacgaatgaactgggtaaagataaattcgagatagtgaccccgagtgaatctattctcgcagagccgaccgtttccgtggtcgacaaagtggtggaaaagaaagacaccaaagcggtagcggaagcctacctgaagtatctctactcgccggaagggcaggagatagcagcgaaaaacttctaccgtccgcgcgatgctgacgtggcgaaaaaatacgacgatgcgtttccgaagctgaagctgttcaccattgacgaggtgtttggcggctgggcgaaggcgcaaaaagatcacttcgctaatggcggtacgttcgaccaaatcagcaaacgctaa

SEQ ID NO: 498 - protein, 308 aa, Salmonella typhimurium
TTKKADYIWFNGEMVRNEDAKVHVMSHALHYGTSVFEGIRCYDSHKGPVVFRHREHMQRLRDSAKIYRFPVSQSIDELMEACRDVIRKNNLTSAYIRPLVFVGDVGMGVNPPPGYTTDVIIAAFPWGAYLGAEALDQGIDAMVSSWNRAAPNTIPTAAKAGGNYLSSLLVGSEARRHGYQEGIALDVNGYISEGAGENLFEVKDGVLFTPPFTSSALPGITRDAIIKLAKELGIEVREQVLSRESLYLADEVFMSGTAAEITPVRSVDGIQVGEGRCGPVTKRIQQAFFGLFTGETEDKWGWLDPVNS

SEQ ID NO: 499 - protein, 353 aa, Salmonella typhimurium
MHLRHLFSPRLRGSLLLGSLLVASSFSTLAAEDMLRKAVGKGAYEMAWSQQENALWLATSQSRKLDKGGVVYRLDPVTLEITQAIHNDLKPFGATINAATQTLWFGNTINSAVTAIDAKTGDVKGRLVLDARKRTEEVRPLQPRELVADAATNTIYISGVGKESAIWVVDGETIKLKTTIENTGKMSTGLALDSKAQRLYTTNADGEFITIDTASNKILSRKKLLDDGKEHFFINLSLDTAGHRAFITDSKATEVLVVDTRNGNILAKIAAPASLAVLFNPTRNEAYVTHRQAGQVSVIDAKTYNVVKTFDTPTYPNSLALSADGKTLYVSVKQKSTREQEATQPDDVIRIAL

SEQ ID NO: 500 - protein, 156 aa, Salmonella typhimurium; identical to SEQ ID NO: 259

SEQ ID NO: 501 - protein, 322 aa, Salmonella typhimurium
MGTTKHSKLLILGSGPAGYTAAVYAARANLQPVLITGMEKGGQLTTTTEVENWPGDPNDLTGPLLMERMHEHAAKFETEIIFDHINNVDLQNRPFRLTGDSAEYTCDALIIATGASARYLGLPSEEAFKGRGVSACATCDGFFYRNQKVAVIGGGNTAVEEALYLSNIASEVHLIHRRDGFRAEKILIKRLMDKVENGNIILHTNRTLEEVTGDQMGVTGLRLRDTQQSDNIETLDIAGLFVAIGHSPNTALFEGQLELENGYIKVQSGTHGNATQTSIPGVFAAGDVMDHIYRQAITSAGTGCMAALDAERYLDGLADASK

SEQ ID NO: 502 - protein, 273 aa, Salmonella typhimurium; identical to SEQ ID NO: 285

SEQ ID NO: 503 - protein, 103 aa, Salmonella typhimurium; identical to SEQ ID NO: 234

SEQ ID NO: 504 - protein, 104 aa, Salmonella typhimurium [sequence omitted]

SEQ ID NO: 505 - protein, 417 aa, Salmonella typhimurium; identical to SEQ ID NO: 290

SEQ ID NO: 506 - protein, 131 aa, Salmonella typhimurium; identical to SEQ ID NO: 349

SEQ ID NO: 507 - protein, 47 aa, Salmonella typhimurium
MKSNRQARHILGLDYRISNQRKVVTEGDTSSVVNNPTGRKRRADSQK

SEQ ID NO: 508 - protein, 274 aa, Salmonella typhimurium
MQQLQNVIETAFERRADITPANVDTVTREAVNQVISLLDSGALRVAEKIDGQWVTHQWLKKAVLLSFRINDNQVIDGAESRYFDKVPMKFADYDEARFQKEGFRVVPPAAVRQGAFIARNTVLMPSYVNIGAYVDEGTMVDTWATVGSCAQIGKNVHLSGGVGIGGVLEPLQANPTIIEDNCFIGARSEVVEGVIVEEGSVISMGVYLGQSTKIYDRETGEVHYGRVPAGSVVVSGNLPSKDGKYSLYCAVIVKKVDAKTRGKVGINELLRTID

SEQ ID NO: 509 - protein, 164 aa, Salmonella typhimurium
MVTFHTNHGDIVIKTFDDKAPETVKNFLDYCREGFYNNTIFHRVINGFMIQGGGFEPGMKQKATKEAIKNEANNGLKNTRGTLAMARTQAPHSATAQFFINVADNDFLNFSGESLQGWGYCVFAEVVEGMDVVDKIKGVATGRSGMHQDVPKEDVIIENVTVSE

SEQ ID NO: 510 - protein, 185 aa, Salmonella typhimurium; identical to SEQ ID NO: 374

SEQ ID NO: 511 - protein, 1075 aa, Salmonella typhimurium
MPKRTDIKSILILGAGPIVIGQACEFDYSGAQACKALREEGYRVILVNSNPATIMTDPEMADATYIEPIHWEVVRKIIEKERPDAVLPTMGGQTALNCALELERQGVLEEFGVTMIGATADAIDKAEDRRRFDIAMKKIGLDTARSGIAHTMEEALAVAADVGFPCIIRPSFTMGGTGGGIAYNREEFEEICERGLDLSPTNELLIDESLIGWKEYEMEVVRDKNDNCIIVCSIENFDAMGIHTGDSITVAPAQTLTDKEYQIMRNASMAVLREIGVETGGSNVQFAVNPKNGRLIVIEMNPRVSRSSALASKATGFPIAKVAAKLAVGYTLDELMNDITGGRTPASFEPSIDYVVTKIPRFNFEKFAGANDRLTTQMKSVGEVMAIGRTQQESLQKALRGLEVGATGFDPKVSLDDPEALTKIRRELKDAGADRIWYIADAFRAGLSVDGVFNLTNIDRWFLVQIEELVRLEEKVAEVGITGLNADFLRQLKRKGFADARLAKLAGVREAEIRKLRDQYDLHPVYKRVDTCAAEFATDTAYMYSTYEDECEANPSIDRDKIMVLGGGPNRIGQGIEFDYCCVHASLALREDGYETIMVNCNPETVSTDYDTSDRLYFEPVTLEDVLEIVRIEKPKGVIVQYGGQTPLKLARALEAAGVPVIGTSPDAIDRAEDRERFQHAVDRLKLKQPANATVTAIEQAVEKAKEIGYPLVVRPSYVLGGRAMEIVYDEADLRRYFQTAVSVSNDAPVLLDRFLDDAVEVDVDAICDGEMVLIGGIMEHIEQAGVHSGDSACSLPAYTLSQEIQDVMRQQVQKLAFELQVRGLMNVQFAVKDNEVYLIEVNPRAARTVPFVSKATGVPLAKVAARVMAGKSLTEQGVTQEIIPPYYSVKEVVLPFNKFPGVDPLLGPEMRSTGEVMGVGRTFAEAFAKAQLGSNSTMKKQGRALLSVREGDKERVVDLAAKLLKQGFELDATHGTAIVLGEAGINPRLVNKVHEGRPHIQDRIKNGEYTYIINTTAGRRAIEDSRVIRRSALQYKVHYDTTLNGGFATTMALNADATEKVTSVQEMHAQIKKS

SEQ ID NO: 512 - protein, 103 aa, Salmonella typhimurium; identical to SEQ ID NO: 234

SEQ ID NO: 513 - protein, 109 aa, Salmonella typhimurium
MFGKGGLGNLMKQAQQMQEKMQKMQEEIAQLEVTGESGAGLVKVTINGAHNCRRVEIDPSLLEDDKEMLEDLVAAAFNDAARRIEETQKEKMASVSSGMQLPPGFKMPF

SEQ ID NO: 514 - protein, 410 aa, Salmonella typhimurium
MAKVSLEKDKIKFLLVEGVHQKALESLRAAGYTNIEYHKGALDAEQLKASIRDAHFIGLRSRTHLTEEVINAAEKLVAIGCFCIGTNQVDLNAAAKRGIPVFNAPFSNTRSVAELVIGELLLLLRGVPEANAKAHRGVWNKLAAGSFEARGKKLGIIGYGHIGTQLGILAESLGMHVYFYDIENKLPLGNATQVQHLSELLNMSDVVSLHVPENASTKNMMGAKEIALMKPGSLLINAARGTVVDIPALCDALATKHLAGAAIDVFPTEPATNSDPFTSPLCEFDNVILTPHIGGSTQEAQENIGLEVAGKLIKYSDNGSTLSAVNFPEVSLPLHGGRRLMHIHENRPGVLTALNQIFAEQGVNIAAQYLQTSARMGYVVIDIEADGDVAEKALLAMKAIPGTIRARLLY

SEQ ID NO: 515 - protein, 209 aa, Salmonella typhimurium; identical to SEQ ID NO: 211

SEQ ID NO: 516 - protein, 513 aa, Salmonella typhimurium; identical to SEQ ID NO: 250

SEQ ID NO: 517 - protein, 276 aa, Salmonella typhimurium
MGLRQSLRIAASTLLLACGLQFAHADSSPQTIVFGVAPGPYGDMVKQAIAPTLKEKGYKVVVREFSDYVQPNMALANGSIDANLFQHTLYFDKFTADKGLKLSKLIVVPTAGMGFYSRKINSLDALKKGDIITLSNDPTNLARGLRFLQSLGLITIKDNIDPTKASERDIASNPKGLVFKPLEAAQLPRTLDGVTGALVNGNFAVAAGLDLSSAIKQEHLDENLKNIIAVRSEDADKPFAKDIVEAVKSPAYRAVIDDPKNIYSAFQKPEWMTATP

SEQ ID NO: 518 - protein, 156 aa, Salmonella typhimurium
MNLNATILGQAIAFILFVWFCMKYVWPPLMAAIEKRQKEIADGLASAERAHKDLDLAKASATDQLKKAKAEAQVIIEQANKRRAQILDEAKTEAEQERTKIVAQAQAEIEAERKRAREELRKQVAILAVAGAEKIIERSVDEAANSDIVDKLVAEL

SEQ ID NO: 519 - protein, 143 aa, Salmonella typhimurium
MTIHKKGQAHWEGDIKRGKGTVSTESGVLNQQPYGFNTRFEGAQGTNPEELIGAAHAACFSMALSLMLGEAGFTPTSIDTTADVSLDKVEAGFAITKIALQSKVAVADIDASTFDQIIQKAKAGCPVSQVLNAEITLDYQLNA

SEQ ID NO: 520 - protein, 447 aa, Salmonella typhimurium
MDQTCSLESFLNHVQKRDPHQTEFAQAVREVMTTLWPFLEQNPRYRHMSLLERLVEPERVIQFRVVWLDDKNQVQVNRAWRVQFNSAIGPYKGGMRFHPSVNLSILKFLGFEQTFKNALTTLPMGGGKGGSDFDPKGKSEGEVMRFCQALMTELYRHLGPDTDVPAGDIGVGGREVGFMAGMMRKLSNNSSCVFTGKGLSFGGSLIRPEATGYGLVYFTEAMLKRHGLGFEGMRVAVSGSGNVAQYAIEKAMAFGARVVTASDSSGTVVDESGFTPEKLARLCEIKASRDGRVADYAREFGLTYLEGQQPWSVPVDIALPCATQNELDVDAARVLIANGVKAVAEGANMPTTIEATDLFLEAGVLFAPGKAANAGGVATSGLEMAQNAARLSWKAEKVDARLHHIMLDIHHACVEYGGDNKHTNYVQGANIAGFVKVADAMLAQGVI

SEQ ID NO: 521 - protein, 161 aa, Salmonella typhimurium
MKYDTSELCDIYQEDVNVVEPLFSNFGGRSSFGGQIITVKCFEDNGLLYDLLEQNGRGRVLLVDGGGSVRRALVDAELARLATQNEWEGLVIYGAVRQVDDLEELDIGIQAIAAIPVGAAGEGIGESDVRVNFGGVTFFSGDHLYADNTGIILSEDPLDIE

SEQ ID NO: 522 - protein, 117 aa, Salmonella typhimurium
MDKKSARIRRATRARRKLKELGATRLVVHRTPRHIYAQVIAPNGSEVLVAASTVEKAIAEQLKYTGNKDAAAAVGKAVAERALEKGIKDVSFDRSGFQYHGRVQALADAAREAGLQF

SEQ ID NO: 523 - protein, 356 aa, Salmonella typhimurium
MQKDALNNVRITDEQVLMTPEQLKAAFPLSLAQEAQIAQSRGIISDIIAGRDPRLLVVCGPCSIHDPETALEYARRFKALAAEVSDSLYLVMRVYFEKPRTTVGWKGLINDPHMDGSFDVEAGLKIARQLLVELVNMGLPLATEALDPNSPQYLGDLFSWSAIGARTTESQTHREMASGLSMPVGFKNGTDGSLATAINAMRAAAQPHRFVGINQAGQVALLQTQGNPHGHVILRGGKAPNYSPADVAQCEKEMEQAGLRPSLMVDCSHGNSNKDYRRQPAVAESVVAQIKDGNRSIIGLMIESNIHEGNQSSEQPRSEMKYGVSVTDACISWEMTDALLREIHKDLSGQLAVRVA

SEQ ID NO: 524 - protein, 257 aa, Salmonella typhimurium
MNPLIIKLGGVLLDSEEALERLFTALVNYRESHQRPLVIVHGGGCVVDELMKGLNLPVKKKDGLRVTPADQIGIITGALAGTANKTLLAWAKKHHIASVGLFLGDGDSVNVTQLDEALGHVGLAQPGSPKLINMLLENGFLPVVSSIGVTDDGQLMNVNADQAATALAATLGADLILLSDVSGILDGKGQRIAEMTASKAEQLIDQGIITDGMIVKVNAALDAARALGRPVDIASWRHAEQLPALFNGTPIGTRILA

SEQ ID NO: 525 - protein, 142 aa, Salmonella typhimurium; identical to SEQ ID NO: 224

SEQ ID NO: 526 - protein, 69 aa, Salmonella typhimurium; identical to SEQ ID NO: 189

SEQ ID NO: 527 - protein, 137 aa, Salmonella typhimurium; identical to SEQ ID NO: 190

SEQ ID NO: 528 - protein, 63 aa, Salmonella typhimurium; identical to SEQ ID NO: 260

SEQ ID NO: 529 - protein, 243 aa, Salmonella typhimurium; identical to SEQ ID NO: 256

SEQ ID NO: 530 - protein, 165 aa, Salmonella typhimurium; identical to SEQ ID NO: 217

SEQ ID NO: 531 - protein, 205 aa, Salmonella typhimurium; identical to SEQ ID NO: 263

SEQ ID NO: 532 - protein, 156 aa, Salmonella typhimurium
MNPLKAGDIAPKFSLPDQDGEQVNLTDFQGQRVLVYFYPKAMTPGCTVQACGLRDNMDELKKAGVDVLGISTDKPEKLSRFAEKELLNFTLLSDENHQVCEQFGVWGEKSFMGKTYDGIHRISFLIDADGKIEHVFNDFKTSNHHDVVLNWLKENA

SEQ ID NO: 533 - protein, 308 aa, Salmonella typhimurium
MIKELDMQLRKLTTAMLVMGLSAGLAHAEDGAPAAGSTLDKIAKNGVIVVGHRESSVPFSYYDNQQKVVGYSQDYSNAIVEAVKKKLNKPDLQVKLIPITSQNRIPLLQNGTFDFECGSTTNNLERQKQAAFSDTIFVVGTRLLTKKGGDIKDFPDLKGKAVVVTSGTTSEILLHKLNEEQKMGMRIISAKDHGDSFRTLESGRAVAFMMDDALLAGERAKAKKPDNWEIVGKPQSQEAYGCMLRKNDPEFKKLMDDTIAQAQTSGEAEKWFDKWFKNPIPPKNLNMNFELSDEMKALFKAPNDKALN

SEQ ID NO: 534 - protein, 127 aa, Salmonella typhimurium; identical to SEQ ID NO: 225

SEQ ID NO: 535 - protein, 177 aa, Salmonella typhimurium; identical to SEQ ID NO: 227

SEQ ID NO: 536 - protein, 359 aa, Salmonella typhimurium; identical to SEQ ID NO: 228

SEQ ID NO: 537 - protein, 233 aa, Salmonella typhimurium; identical to SEQ ID NO: 180

SEQ ID NO: 538 - protein, 754 aa, Salmonella typhimurium
MTILTHTLGFPRVGLRRELKKAQESYWAGNTTREALLAVGRELRARHWEQQKQAGIDLLPVGDFAWYDHVLTTSLLLGNVPARHQNNDGSVDIDTLFRIGRGRAPTGEPAAAAEMTKWFNTNYHYIVPEFSKGQQFRLTWTQLLEEVDEALALGHKIKPVLLGPVTYLWLGKVKGEPFDRLTLLKDILPVYQHVLAELAKRGIEWVQIDEPALVLELPQAWLDAFKPAYDALAGQVKLLLTTYFEGVTPNLDTIIALPVQGLHVDLIHGKDDVAELHQRLPVDWLLSAGLINGRNVWRADLTEKYAQINAIVGKRALWVASSCSLLHSPIDLSVETRLDTEVKSWFAFALQKCGELALLRDALNSGETAALEEWSAPIQARRHSRRVHNAAVEKRLAAITAQDSQRENPYEVRAEAQRARFKLPAWPTTTIGSFPQTTEIRGLRLDFKKGNLDANHYRTGIAEHIKQAIIEQERLGLDVLVHGEAERNDMVEYFGEHLDGFVFTQNGWVQSYGSRCVKPPVVIGDISRPAPITVEWAKYAQSLTDKPVKGMLTGPVTILCWSFPREDVTRETIAKQIALALRDEVADLEAAGIGIIQIDEPALREGLPLRRSDWDAYLEWGVEAFRINAAVAKDETQIHTHMCYCEFNDIMDSIAALDADVITIETSRSDMELLESFEAFDYPNEIGPGVYDIHSPNVPSVEWIEALLKKAAQRIPAQRLWVNPDCGLKTRGWPETRAALANMVKAAHNLRQAK

SEQ ID NO: 539 - protein, 176 aa, Salmonella typhimurium; identical to SEQ ID NO: 222

SEQ ID NO: 540 - protein, 495 aa, Salmonella typhimurium [sequence omitted]

SEQ ID NO: 541 - protein, 90 aa, Salmonella typhimurium; identical to SEQ ID NO: 184

SEQ ID NO: 542 - protein, 305 aa, Salmonella typhimurium
MTNLHRLKTLLIAGIVAILALSPAYAKEKFKVITTFTVIADMAKNVAGDAAEVSSITKPGAEIHEYQPTPGDIKRAQGAQLILANGLNLERWFARFYQHLSGVPEVVVSTGVKPMGITEGPYNGKPNPHAWMSAENALIYVDNIRDALVKYDPDNAQIYKQNAERYKAKIRQMADPLRAELEKIPADQRWLVTSEGAFSYLARDNDMKELYLWPINADQQGTPKQVRKVIDTIKKHHIPAIFSESTVSDKPARQVARESGAHYGGVLYVDSLSAADGPVPTYLDLLRVTTETIVNGINDGLRSQQ

SEQ ID NO: 543 - protein, 127 aa, Salmonella typhimurium; identical to SEQ ID NO: 316

SEQ ID NO: 544 - protein, 156 aa, Salmonella typhimurium; identical to SEQ ID NO: 183

SEQ ID NO: 545 - protein, 460 aa, Salmonella typhimurium; identical to SEQ ID NO: 191

SEQ ID NO: 546 - protein, 241 aa, Salmonella typhimurium; identical to SEQ ID NO: 212

SEQ ID NO: 547 - protein, 169 aa, Salmonella typhimurium; identical to SEQ ID NO: 275

SEQ ID NO: 548 - protein, 200 aa, Salmonella typhimurium; identical to SEQ ID NO: 215

SEQ ID NO: 549 - protein, 179 aa, Salmonella typhimurium; identical to SEQ ID NO: 200

SEQ ID NO: 550 - protein, 458 aa, Salmonella typhimurium
MALWGGRFTQAADQRFKQFNDSLRFDYRLAEQDIVGSVAWSKALVTVGVLTADEQRQLEEALNVLLEEVRANPQQILQSDAEDIHSWVEGKLIDKVGQLGKKLHTGRSRNDQVATDLKLWCKETVRELLTANRQLQSALVETAQANQDAVMPGYTHLQRAQPVTFAHWCLAYVEMLARDESRLQDTLKRLDVSPLGCGALAGTAYEIDREQLAGWLGFTSATRNSLDSVSDRDHVLELLSDAAIGMVHLSRFAEDLIFFNSGEAGFVELSDRVTSGSSLMPQKKNPDALELIRGKCGRVQGALTGMMMTLKGLPLAYNKDMQEDKEGLFDALDTWLDCLHMAALVLDGIQVKRPRCQDAAQQGYANATELADYLVAKGVPFREAHHIVGEAVVEAIRQGKPLEALPLADLQKFSRVIGDDVYPILSLQSCLDKRAAKGGVSPLQVAQAINDAKARLAL

SEQ ID NO: 551 - protein, 329 aa, Salmonella typhimurium [sequence omitted]

SEQ ID NO: 552 - protein, 331 aa, Salmonella typhimurium
MRHTVIFASAFATLVTASAFAADLPGKGITVQPIQSTISEETFQTLLVSRALEKLGYTVNKPSEVDYNVGYTSIASGDATFTAVNWQPLHDDMYAAAGGDNKFYREGVFVSGAAQGYLIDKKTAEQYNITNIAQLKDPKIAKIFDTNGDGKADMMGCSPGWGCEAVINHQNKAFDLQKTVEVSHGNYAAMMADTITRFKEGKPVLYYTWTPYWVSDVMKPGKDVVWLQVPFSSLPGEQKNIDTKLPNGANYGFPVNTMHIVANKAWAEKNPAAAKLFAIMKLPLADINAQNAMMHAGKSSEADVQGHVDGWINAHQQQFDGWVKEALAAQK

SEQ ID NO: 553 - protein, 283 aa, Salmonella typhimurium; identical to SEQ ID NO: 247

SEQ ID NO: 554 - protein, 271 aa, Salmonella typhimurium
MAFKFKTFAAVGALIGSLALAGCGQDEKDPNHIKVGVIVGAEQQVAEVAQKVAKEKYGLDVELVTFNDYVLPNEALSKGDIDANAFQHKPYLDQQIKDRGYKLVSVGKTFVYPIAGYSKKIKSLDELKDGSQVAVPNDPTNLGRSLLLLQKVGLIKLKDGVGLLPTSLDIVENPKNLKIVELEAPQLPRSLDDAQIALAVINTTYASQIGLTPAKDGIFVEDKDSPYVNLIVTREDNKDAENVKKFVQAYQSDEVYEAANKVFNGGAVKGW

SEQ ID NO: 555 - protein, 1407 aa, Salmonella typhimurium; identical to SEQ ID NO: 201

SEQ ID NO: 556 - protein, 548 aa, Salmonella typhimurium; identical to SEQ ID NO: 172

SEQ ID NO: 557 - protein, 432 aa, Salmonella typhimurium; identical to SEQ ID NO: 176

SEQ ID NO: 558 - protein, 331 aa, Salmonella typhimurium; identical to SEQ ID NO: 177

SEQ ID NO: 559 - protein, 387 aa, Salmonella typhimurium; identical to SEQ ID NO: 192

SEQ ID NO: 560 - protein, 760 aa, Salmonella typhimurium; identical to SEQ ID NO: 181

SEQ ID NO: 561 - protein, 557 aa, Salmonella typhimurium; identical to SEQ ID NO: 173

SEQ ID NO: 562 - protein, 704 aa, Salmonella typhimurium; identical to SEQ ID NO: 170

SEQ ID NO: 563 - protein, 167 aa, Salmonella typhimurium; identical to SEQ ID NO: 204

SEQ ID NO: 564 - protein, 432 aa, Salmonella typhimurium; identical to SEQ ID NO: 188

SEQ ID NO: 565 - protein, 468 aa, Salmonella typhimurium
SAEHVLTMLNEHEVKFVDLRFTDTKGKEQHVTIPAHQVNAEFFEEGKMFDGSSIGGWKGINESDMVLMPDASTAVIDPFFADSTLIIRCDILEPGTLQGYDRDPRSIAKRAEDYLRATGIADTVLFGPEPEFFLFDDIRFGASISGSHVAIDDIEGAWNSSTKYEGGNKGHRPGVKGGYFPVPPVDSAQDIRSEMCLVMEQMGLVVEAHHHEVATAGQNEVATRFNTMTKKADEIQIYKYVVHNVAHRFGKTATFMPKPMFGDNGSGMHCHMSLAKNGTNLFSGDKYAGLSEQALYYIGGVIKHAKAINALANPTTNSYKRLVPGYEAPVMLAYSARNRSASIRIPVVASPKARRIEVRFPDPAANPYLCFAALLMAGLDGIKNKIHPGEPMDKNLYDLPPEEAKEIPQVAGSLEEALNALDLDREFLKAGGVFTDEAIDAYIALRREEDDRVRMTPHPVEFELYYSV

SEQ ID NO: 566 - protein, 243 aa, Salmonella typhimurium
MKKLVLAALLASFATGSIAAEKINFGVSATYPPFESLDASNKIVGFDIDLATALCKQMQAECTFTNHAFDSLIPALKFRKYDAVISGMDITPERSKQVAFSNPYYANSALVIAKKDTYKTFTDLKGKRIGMENGTTHQKYLQDKHPEVKTVAYDSYQNAIIDLKNGRIDGVFGDTAVVNEWLKTNPQLGPATEKVTDPQYFGTGLGIAVRPDNKALLEKLNNALAAIKADGTYQKISDQWFPQ

SEQ ID NO: 567 - protein, 187 aa, Salmonella typhimurium; identical to SEQ ID NO: 203

SEQ ID NO: 568 - protein, 161 aa, Salmonella typhimurium
MKKWLLAAGLGLAMVTSAQAADKIAIVNMGNLFQQVAQKTGVSNTLENEFKGRAAELQKMETDLQSKMQRLQSMKAGSDRTKLEKDVMSQRQTFAQKAQAFEKDRARRSNEERNKLVTRIQTAVKKVANDQSIDLVVDANTVAYNSSDVKDITADVLKQVK

SEQ ID NO: 569 - protein, 248 aa, Salmonella typhimurium; identical to SEQ ID NO: 305

SEQ ID NO: 570 - protein, 97 aa, Salmonella typhimurium; identical to SEQ ID NO: 240

SEQ ID NO: 571 - protein, 234 aa, Salmonella typhimurium; identical to SEQ ID NO: 194

SEQ ID NO: 572 - protein, 378 aa, Salmonella typhimurium; identical to SEQ ID NO: 289

SEQ ID NO: 573 - protein, 85 aa, Salmonella typhimurium
MFQQEVTITAPNGLHTRPAAQFVKEAKGFTSEITVTSNGKSASAKSLFKLQTLGLTQGTVVTISAEGEDEQKAVEHLVKLMAELE

SEQ ID NO: 574 - protein, 121 aa, Salmonella typhimurium; identical to SEQ ID NO: 182

SEQ ID NO: 575 - protein, 57 aa, Salmonella typhimurium [sequence omitted]

SEQ ID NO: 576 - protein, 543 aa, Salmonella typhimurium
MSNITKKSLIAAGILTALIAASAATAADVPAGVQLADKQTLVRNNGSEVQSLDPHKIEGVPESNVSRDLFEGLLISDVEGHPSPGVAEKWENKDFKVWTFHLRENAKWSDGTPVTAHDFVYSWQRLADPNTASPYASYLQYGHIANIDDIIAGKKPATDLGVKALDDHTFEVTLSEPVPYFYKLLVHPSVSPVPKSAVEKFGDKWTQPANIVTNGAYKLKNWVVNERIVLERNPQYWDNAKTVINQVTYLPISSEVTDVNRYRSGEIDMTYNNMPIELFQKLKKEIPNEVRVDPYLCTYYYEINNQKAPFNDVRVRTALKLALDRDIIVNKVKNQGDLPAYSYTPPYTDGAKLVEPEWFKWSQQKRNEEAKKLLAEAGFTADKPLTFDLLYNTSDLHKKLAIAVASIWKKNLGVNVNLENQEWKTFLDTRHQGTFDVARAGWCADYNEPTSFLNTMLSDSSNNTAHYKSPAFDKLIADTLKVADDTQRSELYAKAEQQLDKDSAIVPVYYYVNARLVKPWVGGYTGKDPLDNIYVKNLYIIKH

SEQ ID NO: 577 - protein, 365 aa, Salmonella typhimurium
MKGKTLLAGCIALSLSHMAFADDIKVAVVGAMSGPVAQYGDQEFTGAEQAIADINAKGGIKGDKLVAVKYDDACDPKQAVAVANKVVNDGIKYVIGHLCSSSTQPASDIYEDEGILMITPAATAPELTARGYKLVLRTTGLDSDQGPTAAKYILEKVKPQRIAIIHDKQQYGEGLARAVQDGLKKGGVNVVFFDGITAGEKDFSTLVARLKKENIDFVYYGGYHPEMGQILRQSRAAGLKTQFMGPEGVANVSLSNIAGESAEGLLVTKPKNYDQVPANKPIVDAIKAKKQDPSGAFVWTTYAALQSLQAGLNHSDDPAEIAKYLKGATVDTVMGPLSWDEKGDLKGFEFGVFDWHANGTATDAK

SEQ ID NO: 578 - protein, 87 aa, Salmonella typhimurium; identical to SEQ ID NO: 309

SEQ ID NO: 579 - protein, 169 aa, Salmonella typhimurium
MSSRNNPARVAIVMGSKSDWATMQFAAEIFEILDVPHHVEVVSAHRTPDKLFSFAETAEENGYQVIIAGAGGAAHLPGMIAAKTLVPVLGVPVQSAALSGVDSLYSIVQMPRGIPVGTLAIGKAGAANAALLAAQILAQHDAELHQRIADWRKAQTDEVLENPDPRGTL

SEQ ID NO: 580 - protein, 128 aa, Salmonella typhimurium; identical to SEQ ID NO: 303

SEQ ID NO: 581 - protein, 536 aa, Salmonella typhimurium
MLRRDFLKYSVALGVASALPLWSRAAFAAERPALPIPDLLTADASNRMQLIVKAGQSTFAGKNATTWGYNGNLLGPAVQLHKGKSVTVDIHNQLAEDTTLHWHGLEIPGIVDGGPQGIIPAGGTRTVTFTPEQRAATCWIHPHKHGKTGRQVAMGLAGLVLIEDDEIRKLRLPKQWGIDDVPVIIQDKRFSADGQIDYQLDIMTAAVGWFGDTLLTNGAIYPQHSAPKGWLRLRLLNGCNARSLNIAASDNRPLYVIASDGGLLAEPVKVTELPLLMGERFEVLVDISDGKAFDLVTLPVSQMGMAIAPFDKPHPVMRIQPLRITASGTLPDTLTTMPALPSLEGLTVRNLKLSMDPRLDMMGMQMLMKKYGAQAMSGMDHDSMNAHMQGGNMGHGEMDHGNMDHSGMNHGAMGNMNHGGKFDFHNANFINGQVFDMNKPMFAAQKGRHERWVISGVGDMMLHPFHIHGTQFRILSENGKAPAAHRTGWKDTVRVEGGISEVLVKFDHDAPKEHAYMAHCHLLEHEDTGMMLGFTV

SEQ ID NO: 582 - protein, 167 aa, Salmonella typhimurium; identical to SEQ ID NO: 206

SEQ ID NO: 583 - protein, 109 aa, Salmonella typhimurium; identical to SEQ ID NO: 255

SEQ ID NO: 584 - protein, 329 aa, Salmonella typhimurium
MKKWGVGFTLLLASTSILAKDIQLLNVSYDPTRELYEQYNKAFSAHWKQETGDNVVIRQSHGGSGKQATSVINGIEADVVTLALAYDVDAIAERGRIDKNWIKRLPDNSAPYTSTIVFLVRKGNPKQIHDWNDLIKPGVSVITPNPKSSGGARWNYLAAWGYALHHNNNDQAKAQDFVKALFKNVEVLDSGARGSTNTFVERGIGDVLIAWENEALLATNELGKDKFEIVTPSESILAEPTVSVVDKVVEKKDTKAVAEAYLKYLYSPEGQEIAAKNFYRPRDADVAKKYDDAFPKLKLFTIDEVFGGWAKAQKDHFANGGTFDQISKR

SEQ ID NO: 585 - protein, 225 aa, Salmonella typhimurium
MKQYLIAPSILSADFARLGEDTAKALAAGADVVHFDVMDNHYVPNLTIGPMVLKSLRQYGITAPIDVHLMVKPVDRIVPDFAAAGASIITFHPEASEHVDRTLQLIKEHGCKAGLVFNPATPLSYLDYVMDKLDVILLMSVNPGFGGQSFIPQTLDKLREVRRRIDASGYDIRLEVDGGVKVNNIGEIAAAGADMFVAGSAIFDKPDYKKVIDEMRSELAKVTHG

SEQ ID NO: 586 - protein, 113 aa, Salmonella typhimurium
MNKNVAGILSAAAVMTMLAGCTAYDRTKDQFVEPVVKDVKKGMSRAQVAQIAGKPSSEVSMIHARGTCQTYILGQRDGKAETYFVALDDTGHVINSGYQTCAEYDTDPQAPKQ

SEQ ID NO: 587 - protein, 350 aa, Salmonella typhimurium
MTDIAQLLGKDADSLLQHRCMTIPSDQLYLPGKDYVDRVMIDNNRPPAVLRNMQTLYNTGRLAGTGYLSILPVDQGVEHSAGASFAANPRYFDPKNIVELAIEAGCNCVASTYGVLASVSRRYAHRIPFLVKLNHNETLSYPTEYDQTLYASVEQAFNMGAVAVGATIYFGSEQSRRQIEEISAAFERAHELGMVTVLWAYLRNSSFKKDGVDYHVSADLTGQANHLAATIGADIVKQKMAENNGGYKAVNFGYTDDRVYSKLTSDNPIDLVRYQLANCYMGRAGLINSGGADGGDTDLGDAVRTAVINKRAGGMGLILGRKAFKKSMADGVKLINAVQDVYLDSKVTIA

SEQ ID NO: 588 - protein, 338 aa, Salmonella typhimurium
MAVNLLKKRPLTLAAMLLLAGQAQATELLNSSYDVSRELFAALNPPFEQQWAKDNGGDKLTIKQSHAGSSKQALAILQGLKADVVTYNQVTDVQILHDKGKLIPADWQSRLPNNSSPFYSTMGFLVRKGNPKNIHDWSDLVRSDVKLIFPNPKTSGNARYTYLAAWGAADNADGGDKAKTEQFMTQFLKNVEVFDTGGRGATTTFAERGLGDVLISFESEVNNIRKQYEAQGFEVVIPKTNILAEFPVAWVDKNVQANGTEKAAKAYLNWLYSPQAQTIITHYYYRVNNPEIMGKQADKFPQTELFRVEEKFGSWPEVMKTHFASGGELDKLLAAGRK

SEQ ID NO: 589 - protein, 260 aa, Salmonella typhimurium
MKKLALSLSLVLAFSSATAAFAAIPQKIRIGTDPTYAPFESKNAQGELVGFDIDLAKELCKRINTQCTFVENPLDALIPSLKAKKIDAIMSSLSITEKRQQEIAFTDKLYAADSRLVVAKNSDIQPTVASLKGKRVGVLQGTTQETFGNEHWAPKGIEIVSYQGQDNIYSDLTAGRIDAAFQDEVAASEGFLKQPVGKDYKFGGPAVKDEKLFGVGTGMGLRKEDNELREALNKAFAEMRADGTYEKLAKKYFDFDVYGG

SEQ ID NO: 590 - protein, 353 aa, Salmonella typhimurium
MAIDENKQKALAAALGQIEKQFGKGSIMRLGEDRSMDVETISTGSLSLDIALGAGGLPMGRIVEIYGPESSGKTTLTLQVIAAAQREGKTCAFIDAEHALDPVYARKLGVDIDNLLCSQPDTGEQALEICDALARSGAVDVIVVDSVAALTPKAEIEGEIGDSHMGLAARMMSQAMRKLAGNLKQSNTLLIFINQIRMKIGVMFGNPETTTGGNALKFYASVRLDIRRIGAVKEGDNVVGSETRVKVVKNKIAAPFKQAEFQILYGEGINFYGELVDLGVKEKLIEKAGAWYSYNGEKIGQGKANATTWLKENPATAKEIEKRVRELLLSNQNATPDFAVDDSEGVAETNEDF

SEQ ID NO: 591 - protein, 391 aa, Salmonella typhimurium
MVKDAPQDTGAHTQHISLQEKNAMKNVGFIGWRGMVGSVLMQRMVEERDFDAIRPVFFSTSQFGQAAPTFGDTSTGTLQDAFDLDALKALDIIVTCQGGDYTNEIYPKLRESGWQGYWIDAASTLRMKDDAIIILDPVNQDVITDGLNNGVKTFVGGNCTVSLMLMSLGGLFAHNLVDWVSVATYQAASGGGARHMRELLTQMGQLYGHVADELATPSSAILDIERKVTALTRSGELPVDNFGVPLAGSLIPWIDKQLDNGQSREEWKGQAETNKILNTASVIPVDGLCVRVGALRCHSQAFTIKLKKEVSIPTVEELLAAHNPWAKVVPNDRDITMRELTPAAVTGTLTTPVGRLRKLNMGPEFLSAFTVGDQLLWGAAEPLRRMLRQLA

SEQ ID NO: 592 - protein, 91 aa, Salmonella typhimurium [sequence omitted]

SEQ ID NO: 593 - protein, 176 aa, Salmonella typhimurium; identical to SEQ ID NO: 365

SEQ ID NO: 594 - protein, 90 aa, Salmonella typhimurium; identical to SEQ ID NO: 399

SEQ ID NO: 595 - protein, 167 aa, Salmonella typhimurium
MNIKTVEDLFIHLLSDTYSAEKQLTKALPKLARATSNEKLSQAFQSHLEETQGQIERIDQIVESESGIKLKRMKCVAMEGLIEEANEVIESTEKNEVRDAALIAAAQKVEHYEIASYGTLATLAEQLGYSKALKLLKETLDEEKQTDLKLTDLAVSNVNKSAERKSK

SEQ ID NO: 596 - protein, 388 aa, Salmonella typhimurium; identical to SEQ ID NO: 226

SEQ ID NO: 597 - protein, 65 aa, Salmonella typhimurium [sequence omitted]

SEQ ID NO: 598 - protein, 491 aa, Salmonella typhimurium
MANYFNTLNLRQQLAQLGKCRFMGRDEFADGASYLQGKKVVIVGCGAQGLNQGLNMRDSGLDISYALRKEAIAEKRASWRKATENGFKVGTYEELIPQADLVVNLTPDKQHSDVVRSVQPLMKDGAALGYSHGFNIVEVGEQIRKDITVVMVAPKCPGTEVREEYKRGFGVPTLIAVHPENDPQGEGMAIAKAWAAATGGHRAGVLESSFVAEVKSDLMGEQTILCGMLQAGSLLCFDKLVAEGTDPAYAEKLIQFGWETITEALKQGGITLMMDRLSNPAKLRAYALSEQLKEIMAPLFQKHMDDIISGEFSSGMMADWANDDKKLLTWREETGKTAFETAPQYEGKIGEQEYFDKGVLMIAMVKAGVELAFETMVDSGIIEESAYYESLHELPLIANTIARKRLYEMNVVISDTAEYGNYLFSYACVPLLKPFMAELQPGDLGSAIPEGAVDNAQLRDVNDAIRSHAIEQVGKKLRGYMTDMKRIAVAG

SEQ ID NO: 599 - protein, 671 aa, Salmonella typhimurium
MEPIEQQLTELRTTLRHHEYLYHVMDAPEIPDAEYDRLMRELRELEAQRPDLITPDSPTQRVGAAPLTAFNQIRHEVPMLSLDNVFDEESFLAFNKRVQDRLKSTENVIWCCELKLDGLAVSILYENGVLVSAATRGDGTTGEDITSNVRTIRAIPLKLHGDNIPARLEVRGEVFLPQAGFEKINEDARRTGGKVFANPRNAAAGSLRQLDPRITAKRPLTFFCYGVGILEGGELPDTHLGRLLQFKAWGLPVSDRVTLCDSPQAVLDFYHNVEKDRPTLGFDIDGVVIKVNSLALQELLGFVARAPRWAVAFKFPAQEQMTFVRDVEFQVGRTGAITPVARLEPVQVAGVLVSNATLHNADEIERLGLRIGDKVVIRRAGDVIPQVVNVVLSERPEETRPIVFPTHCPVCGSDVERVEGEAVTRCTGGLICGAQRKESLKHFVSRRAMDVDGMGDKIIDQLVEREYVHTPADLFRLTAGKLTGLDRMGPKSAQNVVNALEKSKTTTFARFLYALGIREVGEATAAGLAAYFGTLEALQAATIDELQKVPDVGIVVATHVFNFFAEESNRDVIGQLLAEGVHWPAPVVINVQEIDSPFAGKTVVLTGSLSQMSRDDAKARLVALGAKVAGSVSKKTDLVIAGEAAGSKLAKAQELGITVIDEAEMIRLLGA

SEQ ID NO: 600 - protein, 92 aa, Salmonella typhimurium; identical to SEQ ID NO: 327

SEQ ID NO: 601 - protein, 128 aa, Salmonella typhimurium
MAYSEKVIDHYENPRNVGSFDNNDDNVGSGMVGAPACGDVMKLQIKVNDEGIIEDARFKTYGCGSAIASSSLVTEWVKGKSLDEAQAIKNTDIADELELPPVKIHCSILAEDAIKAAIADYKSKREAK

SEQ ID NO: 602 - protein, 112 aa, Salmonella typhimurium; identical to SEQ ID NO: 341

SEQ ID NO: 603 - protein, 363 aa, Salmonella typhimurium
MSKNYHIAVLPGDGIGPEVMAQALKVMDAVRSRFDMRITTSHYDVGGIAIDNHGHPLPKATVEGCEQADAILFGSVGGPKWENLPPESQPERGALLPLRKHFKLFSNLRPAKLYQGLEAFCPLRADIAANGFDILCVRELTGGIYFGQPKGREGSGQYEKAFDTEVYHRFEIERIARIAFESARKRRRKVTSIDKANVLQSSILWREIVNDVAKTYPDVELAHMYIDNATMQLIKDPSQFDVLLCSNLFGDILSDECAMITGSMGMLPSASLNEQGFGLYEPAGGSAPDIAGKNIANPIAQILSLALLLRYSLDANDAATAIEQAINRALEEGVRTGDLARGAAAVSTDEMGDIIARYVAEGV

SEQ ID NO: 604 - protein, 158 aa, Salmonella typhimurium
MKGDVKIINYLNKLLGNELVAINQYFLHARMFKNWGLTRLNDVEYHESIDEMKHADKYIERILFLEGIPNLQDLGKLGIGEDVEEMLRSDLRLELEGAKDLREAIAYADSVHDYVSRDMMIEILADEEGHIDWLETELDLIAKLGMQNYLQSQIKVTD

SEQ ID NO: 605 - protein, 502 aa, Salmonella typhimurium
MKKTLVAAGVVIALGIVWTGGAWYTGKKLENHLAEMVTQANEQLKRTAPEAGVELSYQNYQRGVFSSHLQLVVKPVAGADNTWLKPGQSIVLDESVSHGPFPLAQLKTLNLIPSMASVKTTLVNNDAAKPLFDIAKGDAPFVINTRIGYGGDTRSDISLKPLNYENAGEKVAFSGGEFQLNADKDGNVVSLSGEAQSGLVDAVNEYNQKVQLTFNNLKTDGTSKLASFGERVGDQKLTLDKLSIAIEGKEMAVLEGMEITGKSDLVNDGKTINSQLDYSLNSLKVQNQDLGSGKLTLKVGQIDGEAWHQFSQQYHAQTQALLNQPDVAQNPELYQQKVTEAFFSALPVLLKGDPVLTLAPLSWKNAKGETTLNLSLFLKDPATTTAQPQTLAQEVDRSVKSLDAKLAIPMDMAVEFMTQIAKLEGYQQDDAEKLAKQQVQGLSAMGQMFRLTTLKDNTIASSLQYANGQITLNGQKMPLEDFVGLFGMPALSVPDVPALPQQ

SEQ ID NO: 606 - protein, 514 aa, Salmonella typhimurium
MAESQPLSVAPEGAEYLRAVLRAPVYEAAQVTPLQKMEKLSSRLDNVILVKREDRQPVHSFKLRGAYAMMAGLTEEQKAHGVITASAGNHAQGVAFSSARLGVKSLIVMPKATADIKVDAVRGFGGEVLLHGANFDEAKAKAIELAQQQGFTWVPPFDHPMVIAGQGTLALELLQQDSHLDRVFVPVGGGGLAAGVAVLIKQLMPQIKVIAVEAEDSACLKAALEAGHPVDLPRVGLFAEGVAVKRIGDETFRLCQEYLDDIITVDSDAICAAMKDLFEDVRAVAEPSGALALAGMKKYIAQHNIRGERLAHVLSGANVNFHGLRYVSERCELGEQREALLAVTIPEEKGSFLKFCQLLGGRMVTEFNYRFADAKNACIFVGVRVSQGLEERKEIITQLCDGGYSVVDLSDDEMAKLHVRYMVGGRPSKPLQERLYSFEFPESPGALLKFLHTLGTHWNISLFHYRSHGTDYGRVLAAFELGDHEPDFETRLHELGYECHDESNNPAFRFFLAG

SEQ ID NO: 607 - protein, 142 aa, Salmonella typhimurium; identical to SEQ ID NO: 214

SEQ ID NO: 608 - protein, 150 aa, Salmonella typhimurium
MTDNNTALKKAGLKVTLPRLKILEVLQEPDNHHVSAEDLYKRLIDMGEEIGLATVYRVLNQFDDAGIVTRHNFEGGKSVFELTQQHHHDHLICLDCGKVIEFSDDSIEARQREIAAKHGIRLTNHSLYLYGHCAEGDCREDEHAHDDATK

SEQ ID NO: 609 - protein, 644 aa, Salmonella typhimurium
MAKNLILWLVIAVVLMSVFQSFGPSESNGRKVDYSTFLQEVNQDQVREARINGREINVTKKDSNRYTTYIPINDPKLLDNLLTKNVKVVGEPPEEPSLLASIFISWFPMLLLIGVWIFFMRQMQGGGGKGAMSFGKSKARMLTEDQIKTTFADVAGCDEAKEEVAELVEYLREPSRFQKLGGKIPKGVLMVGPPGTGKTLLAKAIAGEAKVPFFTISGSDFVEMFVGVGASRVRDMFEQAKKAAPCIIFIDEIDAVGRQRGAGLGGGHDEREQTLNQMLVEMDGFEGNEGIIVIAATNRPDVLDPALLRPGRFDRQVVVGLPDVRGREQILKVHMRRVPLATDIDAAIIARGTPGFSGADLANLVNEAALFAARGNKRVVSMVEFEKAKDKIMMGAERRSMVMTEAQKESTAYHEAGHAIIGRLVPEHDPVHKVTIIPRGRALGVTFFLPEGDAISASRQKLESQISTLYGGRLAEEIIYGVEHVSTGASNDIKVATNLARNMVTQWGFSEKLGPLLYAEEEGEVFLGRSVAKAKHMSDETARIIDQEVKALIERNYNRARQILTDNMDILHAMKDALMKYETIDAPQIDDLMARREVRPPAGWEDPNGTNNSDSNGTPQAPRPVDEPRTPNPGNTMSEQLGDK

SEQ ID NO: 610 - protein, 176 aa, Salmonella typhimurium
MAITGIFFGSDTGNTENIAKMIQKQLGKDVADVHDIAKSSKEDLEGYDILLLGIPTWYYGEAQCDWDDFFPTLEEIDFNGKLVALFGCGDQEDYAEYFCDALGTIRDIIEPRGATIVGHWPTAGYHFEASKGLADDDHFVGLAIDEDRQPELTAERVEKWVKQVSAELHLDDILNA

SEQ ID NO: 611 - protein, 514 aa, Salmonella typhimurium
MKIRSQVGMVLNLDKCIGCHTCSVTCKNVWTGREGMEYAWFNNVETKPGIGYPKNWEDQQEWQGGWVRDVNGKIRPRLGGKMGVISKIFANPVIPQIDDYYEPFTFDYQHLHNAPESKHQPTARPRSLIDGKRMDKVIWGPNWEELLGGEFEKRARDRNFDNIQKEMYGQFENTFMMYLPRLCEHCLNPSCVATCPSGAIYKREEDGIVLIDQDKCRGWRLCISGCPYKKIYFNWKSGKSEKCIFCYPRIESGQPTVCSETCVGRIRYLGVLLYDADRIEEAASTEHETDLYERQCDVFLNPHDPAVIEEALKQGIPQNVIDAAQRSPVYKMAMDWKLALPLHPEYRTLPMVWYVPPLSPIQSYADAGGLPHNGNILPAVETLRIPVQYLANMLSAGDTGPVIRALKRMMAMRHYMRSQTVEGVTDTRAIEEVGLSIQQVEEMYRYLAIANYEDRFVIPTSHREMARDAFPERNGCGFTFGDGCHGSDTKFNLFNSSRIDAINITEVRDKAEGE

SEQ ID NO: 612 - protein, 213 aa, Salmonella typhimurium
MKNWKTSAEAILTTGPVVPVIVVNKLEHAVPMAKALVAGGVRVLEVTLRTACAMDAIRAIAKEVPEAIVGAGTVLNPQQLAEVTEAGAQFAISPGLTEPLLKAATAGTIPLIPGISTVSELMLGMDYGLKEFKFFPAEANGGTKALQAIAGPFSQVRFCPTGGISPANYRDYLALKSVLCIGGSWLVPADALEAGDYDRITKLAREAVEGAKQ

SEQ ID NO: 613 - protein, 61 aa, Salmonella typhimurium
MLILTRRVGETLMIGDEVTVTVLGVKGNQVRIGVNAPKEVSVHREEIYQRIQAEKSQQSSY

SEQ ID NO: 614 - protein, 183 aa, Salmonella typhimurium
MMIVIKTAIPDVLILEPKVFGDERGFFFESYNQQTFEELIGRKVTFVQDNHSKSKKNVLRGLHFQRGENAQGKLVRCAVGEVFDVAVDIRKESPTFGQWVGVNLSAENKRQLWIPEGFAHGFVTLSEYAEFLYKATNYYSPSSEGSILWNDEAIGIEWPFSQLPELSAKDAAAPLLDQALLTE

SEQ ID NO: 615 - protein, 726 aa, Salmonella typhimurium
MGMRVKKFIWLITVVSTGVNSPLSAAESTDDNGETMVVESTAEQVLKQQPGVSIITRDDIQKNPPVNDLADIIRKMPGVNLTGNSASGTRGNNRQIDIRGMGPENTLVLIDGVPVTSRNSVRYSWRGERDTRGDTNWVPPEMVERIEVIRGPAVARYGSGAAGGVVNIITKRPTNDWHGSLSLYTNQPESSKEGDTRRGNFSLSGPLAGDTLTMRLYGNLNRTDADSWDINSSAGTKNAAGREGVTNKDINSVFSWKMTPQQILDFEAGYSRQGNIYAGDTQNSTSNAVTKSLAQSGRETNRLYRQNYGLTHNGIWDWGQSRLGFYYEKTDNTRMNEGLSGGGEGRITNDQTFTTNRLTSYRTSGEVNVPVIWLFEQTLTVGAEWNRDELNDPSSTSLTVKDSNIAGIPGSAANRSSKNKSEISALYVEDNIEPMAGTNIIPGLRFDYLSESGSNFSPSLNLSQELGEYVKVKAGIARAFKAPNLYQTSEGYLLYSKGNGCPKDITSGGCYLVGNKNLDPEISINKEIGLEFTVDDYHASVTYFRNDYQNKIVAGDQIIGRSASGAYVLQWQNGGKALIEGIEASMAVPLMPDRLNWNTNATYMIASEQKDTGNPLSIIPKYTVNTFLDWTITSALSANVNWTLYGKQKPRTHAESRSEETKGLSGKALGAYSLVGANVNYDINKNLRLNVGISNIFDKQIYRSAEGANTYNEPGRAYYAGVTASF

SEQ ID NO: 616 - protein, 405 aa, Salmonella typhimurium
MATEQTAITRATFDEVILPVYAPADFIPVKGKGSRVWDQQGKEYIDFAGGIAVTALGHCHPALVEALKSQGETLWHTSNVFTNEPALRLGRKLIDATFAERVLFMNSGTEANETAFKLARHYACVRHSPFKTKIIAFHNAFHGRSLFTVSVGGQPKYSDGFGPKPADIIHVPFNDLHAVKAVMDDHTCAVVVEPIQGEGGVQAATPEFLKGLRDLCDEHQALLVFDEVQCGMGRTGDLFAYMHYGVTPDILTSAKALGGGFPVSAMLTTQEIASAFHVGSHGSTYGGNPLACAVAGAAFDIINTPEVLQGIHTKRQQFVQHLQAIDEQFDIFSDIRGMGLLIGAELKPKYKGRARDFLYAGAEAGVMVLNAGADVMRFAPSLVVEEADIHEGMQRFAQAVGKVVA

SEQ ID NO: 617 - protein, 447 aa, Salmonella typhimurium
MTTILKHLPAGQRIGIAFSGGLDTSAALLWMRQKGAVPYAYTANLGQPDEDDYDAIPRRAMEYGAENARLIDCRKQLVAEGIAAIQCGAFHNTTGGLTYFNTTPLGRAVTGTMLVAAMKEDGVNIWGDGSTYKGNDIERFYRYGLLTNAELQIYKPWLDTDFIDELGGRHEMSEFMIACGFDYKMSVEKAYSTDSNMLGATHEAKDLEFLNSSVKIVNPIMGVKFWDESVKIPAEVVTVRFEQGHPVALNGKTFSDDVEMMLEANRIGGRHGLGMSDQIENRIIEAKSRGIYEAPGMALLHIAYERLLTGIHNEDTIEQYHSHGRQLGKLLYQGRWFDSQALMLRDGLQRWVASQITGEVTLELRRGNDYSILNTVSDNLTYKAERLTMEKGESVFSPDDRIGQLTMRNLDITDTREKLFGYAKAGLLTASSATGLPQVENLENKGK

SEQ ID NO: 618 - protein, 155 aa, Salmonella typhimurium
MIKRVLAVSLMGLSLAGCVNNDSLSGDVYTASEAKQVQNVTYGTIVNVRPVQIQGGDDSNVIGAIGGAVLGGFLGNTIGGGTGRSLATAAGAVAGGVAGQGVQSAMNKTQGVELEIRKDDGNTIMVVQKQGNTRFSAGQRVVLASNGSQVTVSPR

SEQ ID NO: 619 - protein, 168 aa, Salmonella typhimurium
MSQTVHFQGNPVTVANVIPQAGSKAQAFTLVAKDLSDVSLSQYAGKRKVLNIFPSIDTGVCAASVRKFNQLATEVENTVVLCVSADLPFAQSRFCGAEGLSNVITLSTLRNNEFLKNYGVEIVDGPLKGLAARAVIVLDENDNVIFSQLVDEITHEPDYDAALNVLKA

SEQ ID NO: 620 - protein, 123 aa, Salmonella typhimurium; identical to SEQ ID NO: 251

SEQ ID NO: 621 - protein, 680 aa, Salmonella typhimurium
MTNPLLTSFSLPPFSAIKPEHVVPAVTKALADCRAAVEGVVAHGAPYSWENLCQPLAEADDVLGRIFSPISHLNSVKNSPELREAYEQTLPLLSEYSTWVGQHEGLYNAYRDLRDGDHYATLNTAQKKAVDNALRDFELSGIGLPKEKQQRYGEIATRLSELGNQYSNNVLDATMGWTKLITDEAELAGMPESALAAAKAQAEAKEQEGYLLTLDIPSYLPVMTYCDNQALREEMYRAYSTRASDQGPNAGKWDNSPVMEEILALRHELAQLLGFENYAHESLATKMAENPQQVLDFLTDLAKRARPQGEKELAQLRAFAKAEFGVEELQPWDIAYYSEKQKQHLYSISDEQLRPYFPENKAVNGLFEVVKRIYGITAKERTDVDVWHPEVRFFELYDENNELRGSFYLDLYAREHKRGGAWMDDCVGQMRKADGTLQKPVAYLTCNFNRPVNGKPALFTHDEVITLFHEFGHGLHHMLTRIETAGVSGISGVPWDAVELPSQFMENWCWEPEALAFISGHYETGEPLPKELLDKMLAAKNYQAALFILRQLEFGLFDFRLHAEFNPQQGAKILETLFEIKKQVAVVPSPTWGRFPHAFSHIFAGGYAAGYYSYLWADVLAADAYSRFEEEGIFNRETGQSFLDNILTRGGSEEPMELFKRFRGREPQLDAMLEHYGIKG

SEQ ID NO: 622 - protein, 429 aa, Salmonella typhimurium
MKVLVIGNGGREHALAWKAAQSPLVDTVFVAPGNAGTALEPALQNVAIGVTDIPALLSFAQHEKIDLTIVGPEAPLVIGVVDAFRAAGLKIFGPTEGAAQLEGSKAFTKDFLARHQIPTAEYQNFTEIEPALAYLREKGAPIVIKADGLAAGKGVIVAMTLEEAEAAVHDMLAGNAFGDAGHRIVIEEFLDGEEASFIVMVDGEHVLPMATSQDHKRVGNGDTGPNTGGMGAYSPAPVVTDEVHQRTMERIIWPTVKGMAAEGNTYTGFLYAGLMIDKQGNPKVIEFNCRFGDPETQPIMLRMKSDLVDLCLAACDGKLDEKTSEWDERASLGVVIAAGGYPGSYSTGDEIHGLPLEEVADGKVFHAGTKLADDDRVLTSGGRVLCATALGHTVAEAQKRAYALMTDIRWDGSFSRNDIGWRAIEREQN

SEQ ID NO: 623 - protein, 250 aa, Salmonella typhimurium
MAVTKLVLVRHGESQWNKENRFTGWYDVDLSEKGVSEAKAAGKLLKEEGFSFDFAYTSVLKRAIHTLWNVLDELDQAWLPVEKSWKLNERHYGALQGLNKAETAEKYGDEQVKQWRRGFAVTPPELTKDDERYPGHDPRYAKLSEKELPLTESLALTIDRVIPYWNDTILPRMKSGERVIIAAHGNSLRALVKYLDNMSEDEILELNIPTGVPLVYEFDENFKPLKHYYLGNADEIAAKAAAVANQGKAK

SEQ ID NO: 624 - protein, 386 aa, Salmonella typhimurium
MTRKQATIAVRSGLNDDEQYGCVVPPIHLSSTYNFTGFNEPRAHDYSRRGNPTRDVVQRALAELEGGAGAVLTNTGMSAIHLVTTVFLKPGDLLVAPHDCYGGSYRLFDSLATRGCYRVRFVDQGDERALQAALEEKPKLVLVESPSNPLLRVVDIAKICRLAREAGAVSVVDNTFLSPALQNPLALGADLVLHSCTKYLNGHSDVVAGVVIAKDPEVVTELAWWANNIGVTGGAFDSYLLLRGLRTLVPRMELAQRNAQAIVKYLQTQPLVKKLYHPSLPENQGHEIAARQQKGFGAMLSFELDGDEETLRRFLGGLSLFTLAESLGGVESLISHAATMTHAGMSPQARASAGISETLLRISTGIEDGEDLIADLENGFRAANKG

SEQ ID NO: 625 - protein, 55 aa, Salmonella typhimurium [sequence omitted]

SEQ ID NO: 626 - protein, 206 aa, Salmonella typhimurium; identical to SEQ ID NO: 195

SEQ ID NO: 627 - protein, 575 aa, Salmonella typhimurium
MISGILASPGIAFGKALLLKEDEIVIDRKKISADKVDQEVERFLSGRAKASAQLEAIKTKAGETFGEEKEAIFEGHIMLLEDEELEQEIIALIKDKHMTADAAAHEVIEGQATALEELDDEYLKERAADVRDIGKRLLRNILGLAIIDLSAIQEEVILVAADLTPSETAQLNLQKVLGFITDAGGRTSHTSIMARSLELPAIVGTGSVTAQVKNGDYLILDAVNNQVYVNPTNDVIEQLRAVQEQVATEKAELAKLKDLPAITLDGHQVEVCANIGTVRDVEGAERNGAEGVGLYRTEFLFMDRDALPTEEEQFAAYKAVAEACGSQAVIVRTMDIGGDKELPYMNFPKEENPFLGWRAVRIAMDRKEILRDQVRAILRASAFGKLRIMFPMIISVEEVRALRKEIEIYKQELRDEGKAFDESIEIGVMVETPAAATIARHLAKEVDFFSIGTNDLTQYTLAVDRGNDMISHLYQPMSPSVLNLIKQVIDASHAEGKWTGMCGELAGDERATLLLLGMGLDEFSMSAISIPRIKKIIRNTNFEDAKVLAEQALAQPTTDELMTLVNKFIEEKTIC

SEQ ID NO: 628 - protein, 78 aa, Salmonella typhimurium; identical to SEQ ID NO: 237

SEQ ID NO: 629 - protein, 201 aa, Salmonella typhimurium [sequence omitted]

SEQ ID NO: 630 - protein, 751 aa, Salmonella typhimurium
MNKKIHSLTLLVNLGIYGATLPVMAEDKTDSAALTNEDTIVVTAAQQNLQAPGVSTITADEIRKNPPARDVSEIIRTMPGVNLTGNSTSGQRGNNRQIDIRGMGPENTLILIDGKPVTSRNSVRLGWRGERDTRGDTAWVPPEMIERIEVLRGPAAARYGNGAAGGVVNIITKKGGSEWHGSWNTYFNAPEHKDEGATKRTNFSLNGPLGGDFSFRLYGNLDKTQADARNINQGHQSERTGSYADTLPAGREGVINKDINGVVRWDFAPLQSLELEAGYSRQGNLYAGDTQNTNTNQLVKDNYGKETNRLYRQNYSLTWNGGWNNGVTTSNWVQYEHTRNSRMPEGLAGGTEGIFDPKASQKYADADLNDVTLHSEVSLPFDLLVNQNLTLGTEWAQQRMKDQLSNSQTFMGGNIPGYSSTNRSPYSKAEIFSLFAENNMELTDSTMLTPGLRFDHHSIVGDNWSPSLNLSQGLGDDFTLKMGIARAYKAPSLYQTNPNYILYSKGQGCYATGAGTGIGCYMMGNDDLKAETSINKEIGLEFKRDGWLAGVTWFRNDYRNKIEAGTVPLQRINNGKTDVYQWENVPKAVVEGLEGTLNVPVSDTVNWTNNVTYMLQSKNKETGERLSIIPQYTLNSTLSWQVRQDVSLQSTFTWYGKQEPKKYDYQGNPVTGTDKQAVSPYSIVGLSATWDVTKNVSLTGGVDNLFDKRLWREGNAQTVRDTQTGAYMAGAGAYTYNEPGRTWYMSINTHF

SEQ ID NO: 631 - protein, 149 aa, Salmonella typhimurium
MGLFNFVKDAGEKLWDAVTANHDKDDQAKKVQEHLNKTGIPDADKVNVQIADGKATVTGDGLSQEAKEKILVAVGNIAGISSVDDQVKTTTPAAESQFYTVKSGDTLSAISKQVYGNANLYNKIFEANKPMLKSPEKIYPGQVLRIPEE

SEQ ID NO: 632 - protein, 237 aa, Salmonella typhimurium
MQKQAELYRGKAKTVYSTENPDLLVLEFRNDTSAGDGARIEQFDRKGMVNNKFNHFIMTKLAEAGIPTQMERLLSDTECLVKKLEMVPVECVVRNRAAGSLVKRLGVEEGMELNPPIFDLFLKNDALHDPMVNSSYCETFGWVSQENLARMKELTYKANDVLKKLFDDAGLILVDFKLEFGLYKGEVVLGDEFSPDGSRLWDKETLDKMDKDRFRQSLGGLIEAYEAVAHRLGVKLD

SEQ ID NO: 633 - protein, 218 aa, Salmonella typhimurium
MSTFYQKPFLKLLDFTASELTALLQLAAKLKADKKNGKEEQKLVGKNIALIFEKDSTRTRCSFEVAAYDQGARVTYLGSSGSQIGHKESIKDTARVLGRMFDGIQYRGYGQEIVETLAEYSGVPVWNGLTDEYHPTQLLADLLTMQEHLPGKAFNEMTLVYAGDARNNMGNSMLEAAALTGLDLRLVAPKACWPQAALVAECSAMAKKNGGAITLTED

SEQ ID NO: 634 - protein, 714 aa, Salmonella typhimurium
MATTTPERVMQETMDYHALNAMLNLYDKAGHIQFDKDQQAIDAFFATHVRPHSVTFASQHERLGTLVREGYYDDAVLARYDRAFVLRLFEHAHASGFRFQTFLGAWKFYTSYTLKTFDGKRYLEHFEDRVTMVALTLAQGDETLATQLTDEMLSGRFQPATPTFLNCGKQQRGELVSCFLLRIEDNMESIGRAVNSALQLSKRGGGVAFLLSNLREAGAPIKRIENQSSGVIPVMKMLEDAFSYANQLGARQGAGAVYLHAHHPDILRFLDTKRENADEKIRIKTLSLGVVIPDITFRLAKENAQMALFSPYDIQRRYGKPFGDIAISERYDELIADPHVRKTYINARDFFQTLAEIQFESGYPYIMFEDTVNRANPIAGRINMSNLCSEILQVNSASRYDDNLDYTHIGHDISCNLGSLNIAHVMDSPDIGRTVETAIRGLTAVSDMSHIRSVPSIAAGNAASHAIGLGQMNLHGYLAREGIAYGSPEALDFTNLYFYTITWHAVHTSMRLARERGKTFAGFAQSRYASGDYFTQYLQDDWQPKTAKVRALFARSGITLPTREMWLKLRDDVMRYGIYNQNLQAVPPTGSISYINHATSSIHPIVAKIEIRKEGKTGRVYYPAPFMTNENLDMYQDAYDIGPEKIIDTYAEATRHVDQGLSLTLFFPDTATTRDINKAQIYAWRKGIKSLYYIRLRQLALEGTEIEGCVSCAL

SEQ ID NO: 635 - protein, 449 aa, Salmonella typhimurium; identical to SEQ ID NO: 311

SEQ ID NO: 636 - protein, 244 aa, Salmonella typhimurium
MSFEGKIALVTGASRGIGRAIAETLVARGAKVIGTATSENGAKNISDYLGANGKGLMLNVTDPASIESVLENIRAEFGEVDILVNNAGITRDNLLMRMKDDEWNDIIETNLSSVFRLSKAVMRAMMKKRCGRIITIGSVVGTMGNAGQANYAAAKAGLIGFSKSLAREVASRGITVNVVAPGFIETDMTRALSDDQRAGILAQVPAGRLGGAQEIASAVAFLASDEASYITGETLHVNGGMYMV

SEQ ID NO: 637 - protein, 310 aa, Salmonella typhimurium
MVRIYTLTLAPSLDSATITPQIYPEGKLRCSAPVFEPGGGGINVARAIAHLGGTATAIFPAGGATGEHLVALLADENVPVSTVDAKDWTRQNLHVHVESSGEQYRFVMPGATLDDDEFRQLEEQVLEIESGAILVISGSLPPGVKVEKLTQLISAAQKQGIRCIIDSSGDALTAALALGDIELVKPNLKELSALVNRDLTQPDDVRKAAQELVQSGKARRVVVSLGPQGALGIDSENCIQVVPPPVKSQSTVGAGDSMVGAMTLKLAQDASLEEMVRFGVAAGSAATLNQGTRLCSRDDTQKIYAYLSAQ

SEQ ID NO: 638 - protein, 389 aa, Salmonella typhimurium
MTEQEKSSAVVDETRESVETTPQPVNTEKKSKNGAALVLSAVAIAIALAAGIGLYGWGKQQATAQTETSDALATQLTALQKAQESQKAELEGIIKKQAAQLDDANRQQAALAKQLDEVQQKVATISGSDAKTWLLAQADFLVKLAGRKLWSDQDVTTAAALLKSADASLADMNDPSLITARRAITDDIASLSSVAQIDYDGIILKLNQLSNQIDNLRLADNDTDGSPMDSDSSELSSSLSEWRVNLQKSWQNFMDSFITIRRRDDTAVPLLAPNQDVYLRENIRSRLLVAAQAVPRHQEETYRQALDNVSTWVRAYYDTDDAATKAFLEEVDKLSQQNITMDLPETLGSQAILEKLMQTRVRNLLAQPTVSTAAPATQTDAPAAAPQGE

SEQ ID NO: 639 - DNA, 1329 bp, Pseudomonas aeruginosa
tcagcgcagcatgccgctgccgtagcccttcaggttggctttcttcatcagggattcatactggtgagaaacgaggtgagattgcacctgggccataaagtccatgacaaccacgaccacgatcaacagcgaggtcccgccaagatagaacggcacgtgcgccgcaaccaccaggaactggggcagcaggcagacagccgtcatgtacagagcaccgaacatggtcaaacgggtcagcacgccatcgatgtagcgagcggactgttcgcccggacggatgcccggaataaatgcaccggacttcttgaggttctccgccacgtccttcgggttgaacatcagcgctgtatagaagaagcagaagaaaacgatccctgcagtgaacagcaagatgttcagcggctgccccggagcgatcgcttgcgcgacgtcctgcaaccaacccaagccttccgactgaccgaaccaggagcccagggacgccgggaacagcaggatactgctggcgaaaatcgcgggaatcacacccgccatgttcaccttcaacggcagatggctggtctgcgctgcaaacaccttgcggccttgctggcgcttggcgtaatgcaccgcgatgcgacgctggccacgctcgatgaacaccacgaacgcgatgatcgccacggccagcaggccgacgccgatcagggcgaagatgttgatgtcaccttgacgggcagactcgaaagactgaccgatggcgcgcggcaggcctgcaacgataccagcgaagatcaacatcgagatgccgttgccgacaccgcgctcggtgatctgctcgcccagccacatcatgaacatggcaccagccacgaaggtggtgacagccacgaagtagaagccgaagtcgttggagaaggctacgccctggctgcccaggccaacggacatgccgatggcctggaccagtgccaggactacagtaccgtagcgggtgtactggctgatcttgcgacgcccagactcaccctctttcttcaactgctccagctgcgggctgatagcggtcatgagctgcatgatgatcgatgccgagatgtacggcatgatccccagtgcaaagatactcatgcgctccagcgcgccgccggaaaacatgttgaagaggctaagaatggtcccctcgttctgccggaacagtgccgccaagcgatcggggttgatgcccggaactgggatgtgcgcgccgatccgatagacgatgatcgccaggaacaggaaacgcagacgtgcccagagctcggacagaccgccgttgcttagcgcagagagagcaccttgcttagccat

SEQ ID NO: 640 - DNA, 117 bp, Pseudomonas aeruginosa
tcagccttggcgctgcttgtgacgcggttccgcgctgcagatcacccgcacgatgccatcgcgacggatgattttgcagttacggcacagcttcttgaccgatgcacgaactttcat

SEQ ID NO: 641 - DNA, 216 bp, Pseudomonas aeruginosa
ttacttggtggcgccgaatacgccgaaacgctgcttgaagcggtcgatacggccgccggtgtccagcaccttctgcttgccggtgtagaacgggtggcattcggagcacacgtccaagtggatcggcttgcacagggtggaacgggtcttgatgacgttaccgcagctgcaggtagcttcgatagcttcgtaagtcggatggatgtccgctttcat

SEQ ID NO: 642 - DNA, 252 bp, Pseudomonas aeruginosa
ttaggcgtttgccttggcagcgtccttgagcagctgagcaacgcgctcagacggctgtgcaccctggccgagccagtaggtagcacgctcctggtcgacggacagacgcacttcgccaccagtcgcaaccgggttgaagaaaccgatgcgctcgacgaagcgaccatcgcgcgcattgcggctgttggtcacggtcaggtggtagaaggggcgctttttggagccgccacgagcaagacggatggttaccat

SEQ ID NO: 643 - DNA, 528 bp, Pseudomonas aeruginosa
tcagaagtccgcgtcccagtccacccgcatctcgccagcggccaggtcgatcgacagcacgcactgcccggtgtagggcaacaggcgctcgcggtcgtccaggctgcccgcgcagggcttgaccaccatgacatcgttggcaccggtttccagcagatggtcgatcacgccgagcaactgcctgccctggtcgatcaccttcaggccttccagctggtgccagtagtactcaccttcctcgagagagggcaactcgctacgcgggatgcagatctcgtaaccggtgaaggtgcgggcctcttcgcgatcgtcgagccccttgagcttggcggccaggaccttgccatgcaggcgccccctgaccagctcggcctgccgaatctcgccgtcgcgccggagcgtccagcggcgatagtccagcaggttgtccaacgggtcggtaaaggaatacaccttcacctcaccgcggatgccgtacaccgaaacgatcttgccgatcacgaccaggtcgtcggcgggtgtcggcat

SEQ ID NO: 644 - DNA, 312 bp, Pseudomonas aeruginosa
ttaggcctgaatgccggtgatcttgatttcagtgaaccactggcggtggccctgacgcttcatgtggtgcttacgacggcggaacttgatgatgcggaccttgtcgtgacggccgtgggaaaccacttcagcggtaaccttcgcaccttcgacgaccggcaggccgattttcacgtcttcgccattggcaaccagcaggacgcggtcgaaatcgatcgcttcgccggtagcgacgtcgagtttctcgaccttgaggaattcgccttcggtgactttgtgctgcttgccaccggtaacaatcactgcgtacat

SEQ ID NO: 645 - DNA, 237 bp, Pseudomonas aeruginosa
ttattgctggtgagcaacgatgtagtcgatggcttcctgaacggtggtgatcttttcagctttctcgtcagggatttcggtctcgaattcctcttccagagccatcaccagctcgacggtgtcaagggagtcggcgcccaggtcttcgacgaaggaagcgctgttggtgacttcttcttccttcacgccgagttgttcagcgacgatcttcttaacgcgttcttcgatggtgctcat

SEQ ID NO: 646 - DNA, 759 bp, Pseudomonas aeruginosa
atgactgaagtcgacctcaattccgacatgggcgaaggcttcggcccatggaccatcggcgatggcgtggacgcggcgatcatgccgctgatcagcagcgccaacatcgccaccggtttccatgccggcgacccgagcagcatgcgccgcaccgtggagatggccgccgagcatggcgtggccatcggcgcccatccgggcttccgcgacctggtcggcttcgggcgtcggcacatcgccgcgccggccatcgagctggtcaacgacatgctctaccagcttggcgcactgcgcgaattcgcccggctgcagggcctgtcgctgcaacacgtcaagccccacggcgcgctctacatgcacctggcgcgggacgaggtcgccgcgcgcctgttcgtcgagaccctgcaacgcctggaaccggaactgctgctctattgcatgcccggttcggccacctggcgcatcggccgggaactgggccagccgctggtgcgcgagttctacgccgaccgcgactacgaccgcagcggctccatcgtcttcacccggcgggtcgccgccctcgatccgcagcaggtcgccgacaaggtcctgcgcgcctgccgcgagggcaaggtgcgcaccgtcgagggcgaggacctcgacatcgccttcgactcggtgtgcatccacagcgatacccccggtgccctggagctggtcgccagcacccgtgcgcgcctggagggcgccggcatccgcatcaaggcgccgcgttga

SEQ ID NO: 647 - DNA, 276 bp, Pseudomonas aeruginosa
gtggccaacacaccttccgccaaaaaacgcgccaaacaggctgagaagcgtcgcagccacaacgccagcctgcgctccatggtgcgcacctacatcaagaacgtcgtgaaagccatcgacgccaaggacctggaaaaagcccaggccgccttcaccgccgctgtaccggtgatcgaccgcatggctgacaaaggcatcatccacaagaacaaggctgctcgtcataagagccgtctgagcggccacatcaaggccctcagcaccgctgccgcctaa

SEQ ID NO: 648 - DNA, 177 bp, Pseudomonas aeruginosa
ttaaccctccacacgcagcaggtagtaggccttgttgatcatgccgcggttctcaggagtgtcctgaacttcgacggtatgattgatgcgacgcaggccgagacccttgacgcaagccttgtgattggccagacggccgttcaggctcttgaccagagtgactttgacagttgccat

SEQ ID NO: 649 - DNA, 741 bp, Pseudomonas aeruginosa
tcagccttcggcggattcggccggcgcttcctcgacgaactcgtcggcgctggtggcagcgccctgcttgccgcggattaccgcttcggccatcgagttcaggtagagttgcacggcgcggatggcatcatcgttaccgggaattacatagtcgacgccttccgggctgctgttggtatcgacaacgccgatgaccgggatgcccagcttgttggcttcggtgatggcgatgcgctcgtggtcgacgtcgatcacgaacagagcgtccggcaggccgcccatgtccttgatgccgcccaggctgcgctcgagcttctcgaggtcacggctgcgcatcagggcttctttcttggtcagcttgtcgaaggtgccgtcctgggactgggtttccaggtcgcgcaggcgcttgatcgactgacggatggtcttgtagttggtgagcatgccgcccagccagcgatggtcgacgtacggcataccgcaacgagcggcttcctcgcgaacgatcttgccggcggaacgcttggtgccgacgaacaggatcttgttcttgccagcggccaggcgctcaacgaaggtcagggcctcgttgaacatcggcagggtcttttcgaggttgatgatatggatcttgttgcgcgcgccgaaaatgaacttgcccattttcgggttccagtaacgggtctggtggccgaagtgcacaccggccttcagcatatcgcgcatgttgacttgggacat

SEQ ID NO: 650 - DNA, 537 bp, Pseudomonas aeruginosa
ctaaacgtttgggtcacgcttcaactgtgccagtacgctgaacggattaggacgcttgtcctcgacttcgctcgactccggctcgtcttcgacgacgaatccagccgggtgctgacatacttcggggtcatgggccggaacgatgggtaaggcgagcaacagctcgtcctcgaccagcgccagcaggtccaggggttcctcccccacttccagcgcatcgtaccccttcggcagaccgtcggcggactgaccttcccgaagaatggcgtaggtatattcgccatgcacgggaatggccgccgcatccaggcagcgttggcataccatgctcacctcggtatcgagctgcatatgcatgaccgccagcttctggtggtcgcgctcgaaggaaaccttcacgcgcacctcaccggcatcgctggtcagttgctcgcatacacgcggcatatcggcgagcgcgtacacaccttcgagggtggcgccgcggtcgaccaacttgcgcggatcgatatgaggtggaatcggcccattcaacat

SEQ ID NO: 651 - DNA, 429 bp, Pseudomonas aeruginosa
ttaaatcttcagttcttggggctgctgagcggtgtgcgggtggctggcacccttgtacaccttcagcttgcgatacatatcgcgacccagagggttcttcggcagcatgccttttacagcggtctcgatgacgcgctcaggggccttggcgatcagcttctcgaagttgatcgacttgatgccgcccgggaagccggagtggtggtagtacatcttgtcggtggtcttggcaccggtcacacgcacctgctcggcgttgatgacgacgatgtagtcgccggtgtcaacgtgcggagtgtactcaggcttgtgcttgccacgcaggcggcgggcaatttcggtcgccagacgacccagggtctggccggcagcgtcgacgacgaaccagtcgcgctgtacagtttccggtttcgcggtataggttttcat

SEQ ID NO: 652 - DNA, 135 bp, Pseudomonas aeruginosa
tcagacggtcagacgcttacggcctttggcgcgacgacgcgacagaacctgacggccgttcttggtggccatacgggcgcggaaaccgtggacgcgagcgcgcttgagggtgctgggttggaaagtacgtttcat

SEQ ID NO: 653 - DNA, 390 bp, Pseudomonas aeruginosa
ttacacgcgacgctttttcggcggacggcagccgttatgcgggatcggggttacgtcggtgatgctggcgatcttgtagccgcaagcattcagagcgcgaacggcggactcgcggcccgggcccgggcccttgacgttgacgtccaggttcttcagaccgtattccagggcagcctggccggcacgctcggccgctacctgggcagcgaacggggtgctcttacgcgagccgcggaaaccggaaccaccggaggtcgcccaggacagtgcgttgccctgacggtcggtgatggtcacgatggtgttgttgaaagacgcgtggatgtgggcgatcccatcgaccactgtctttttgactttcttacggggacgagcagcaggttttgccat

SEQ ID NO: 654 - DNA, 621 bp, Pseudomonas aeruginosa
ttacttggagtagagctcgacaatcaggttttcgttgatatcagcggacaggtcgctgcgagccggagcactcttgaaggtaccagccttcttgtcgaggtcgacttcgacccactcgacgcgaccgcgctggccacagagttccagagcctgagcgatacgcagctggttcttcgatttttcgcgaacagctacgacgtcaccggccttcacttggtaggaagggatgttgacggtctgaccgttgacggtgatggccttgtgggataccagctggcgggattccgaacgagtggaaccgaagcccatgcggtatacgacgttgtccaggcggcactcgagcagttgcagcaggttctcaccggtagaacccttgcgacgggaagcttcctggtagtaaccgcggaactgacgctccagcacgccgtagatgcgacgtactttctgcttttcacgcagctgcagaccgtagtcggacagacggccacgacgctggccatgctggccaggaacgttttcagccttgcacttcgagtcgagggcgcgggcgccgctcttcaggaacaggtcggtgccttcacggcgagacagtttgcacttgggaccaatgtaacgagccat

SEQ ID NO: 655 - DNA, 603 bp, Pseudomonas aeruginosa
tcatcccagcagctcctcgaacttcttcacggcggacacggtgaccagcaccttgtcgtaggcgatcaggctgacggggtcggaaccttggacatcacgtacatcgacgtgcgccaggttgcgcgcagcgaggtacaggttctcgtcgacaccatcggtcacgatcagcacgtctttcagacccagggtgtccagcttggcaaccaggcccttggttttcggtgcatcgacagcgaagtcggcaacgacgaccagacggtccagacgaacgagctcggcaaggatggagcgcagtgctgcgcggtacatcttcttgttcagcttctgttcgtgactacgcggtttagcggcgaaagtggtgccgcccccacgccagatggggctacggatggtgccagcgcgagcacgaccggtgcccttctgacgccacggcttcttgccaccaccagagacttcggagcgagtcttctgcgccttgctgccctgacggccgccagccatgtaggccacgactgcctggtgcaccagggtctcgttgaattcgccaccaaaggtacgctcggagacttcgatagcctgagcgccgttcacattcaattgcat

SEQ ID NO: 656 - DNA, 372 bp, Pseudomonas aeruginosa
ttacttcggacgcttggcgccgtacttcgaacgaccctgcttacggtctttgacacccgaggtgtccagcgaaccgcgcacggtgtggtaacgcacgcccggaaggtcctttacacgaccgccacggatcagcactacgctgtgctcttgcaggttgtgaccttcaccaccgatgtacgaggaaacctcgaaaccgttggtcagacgtacacggcataccttacgcagtgccgagttcggctttttcggcgtggtggtgtatacgcgggtgcatacgccacgacgttgcgggcagttttgcagcgcaggcacgtcgctcttgtcgaccatgcgcttgcgcggcttacgcaccagctggttgatagttgccat

SEQ ID NO: 657 - DNA, 351 bp, Pseudomonas aeruginosa
ttagaactccagtccgccttcacgagcggcatcagccagcgctttcacacggccgtggtacttgaagccagaacgatcgaacgccacctgggtgacgccggccgctttggcgcgctcggcgaccagttgaccaactttcttggctgcatcgatgttgccggtggcaccttcgcgcaggtctttgtccagggtcgaggcgctggccaggaccttgccgccgtcggccgcaatgacctgggcgtaaatgtgctgggaagagcggtacacgcagaggcgtacggtttccagctcgcgcatcttcaggcgtgccttgcgagcgcgacgcagacgggtttctttcttgacgctcat

SEQ ID NO: 658 - DNA, 636 bp, Pseudomonas aeruginosa
ttaaccgcgagccttggctgccggacgcacgatcacatcaccgccggtagcgccgggaacggcacccttgaccagcagcagattgcgttcagcatcgacgcgcacgatctccagggattgaacggttacccgctccgcacccagatgaccggacattttcttgcccttgaacactcgaccaggagtctggcactggccgatggaacccgggacgcggtgggaaacggagttaccgtgggtgttatcctgaccacggaagttccagcgcttgatggtgcccgcgaagcccttacccttggactcgccggtaacgtctaccatctggcctgcctggaacagatcgacagtgatctggtcaccagcggcatactgctcttcgcccagacggaattcccacacgccgcgaccggcggcgacattcgccttggcaaagtgaccagcttgcgctttggtaacgcgagaagcacgacgctcgccggcggtgacttgcactgcacggtagccatcggtttcttcagtcttgaactgggtgacgcgattcggctcgacctcgatgaccgtaaccggaatagagacaccttcctcggtgaaaatgcgggtcatgccgcatttacgaccgacaacaccaattgtcat

SEQ ID NO: 659 - DNA, 1680 bp, Pseudomonas aeruginosa
ttagccctgattctccatctgagcacggatcagatcaccgatggtggtcggaccagcgctttctacttcctgcttacgcagttctttcattgcgtccttctcgtcgtcgacgtccttggacttgacggagaggctgatgacgcggctcttgcggtcgatgctgatgatcttggcttcgacttcctcgccttccttcaggacgttgcgcgcgtcttcgacgcggtcacggctgatttcggaagccttcaggataccttcgatgtcgtcgcccaggctgatgacagcgcccttggcgtcgacttccttcacggtaccgcggacgatgctgcctttctcgtgcagggacgcgtagttggagaacggatcgtcttccagctgcttgatgcccagggagatgcgctcgcgctccggatcgaccgacaggatgacggtttccagctcgtcgcccttcttgaagcgacgtacggcttcttcgccgacttcgttccaggagatgtcggacaggtggaccaggccgtcgatgccgccgtccagaccgatgaagataccgaagtcggtgatcgacttgatggtaccggagatacggtcacccttgttgaactggctggagaagtcttcccacgggttggatttgcactgcttgatacccagggagatacgacgacgctcttcgtcgatgtccagaacctgaacttccacttcatcgccaacctggacgactttcgacggatggatgttcttgttggtccagtccatttcggagacgtgtaccaggccttccacgccctcttccagctcggcgaagcagccgtagtcggtgaggttggtgacgcgggccatgacgcgggtaccttccgggtaacgcgccttgatggcaacccacgggtcttcgcccagttgcttcaggcccagggatacacggttgcgctcgcggtcgaacttcaggaccttgacgtcgatctcgtcgccaacgttgacgatctcggacggatgcttgatgcgcttccaggccatgtcggtgatgtgtagcaggccgtctacgccgcccaggtccacgaatgcgccgtagtcggtgaggttcttgacgatacctttgacctgctggccttcctgcagcgattccagcagagcttcacgctcggcgctgttctcggcttccaggacgctgcggcgggaaacgacaacgttgttgcgcttctggtcgagcttgatgaccttgaactcgagctctttgccttccaggtgggtggtgtcgcgaaccggacgaacgtcgaccagagaacccggcaggaacgcgcggatgccgttgacgtcgacggtgaaaccgcccttgaccttgccgttgatgacgcccttgaccacttcgtcggcagcgaaagccgcttccagaacaatccagctctcggcgcgcttggctttctcgcgggacagcttggtctcgccaaagccgtcttctaccgcgtccagtgcgacgtggacttcgtcacccaccttgatggtcagctcgccctgttcgttgtagaactgctcgaccgggatgacgccctcggatttcagaccggcatggacggtgacccagtcaccatcgatgtcgaccacgatgccggtgatgatggcacccggctgcatgtcgagggatttcagactttcttcaaagagttctgcgaagctttcgctcat

SEQ ID NO: 660 - DNA, 237 bp, Pseudomonas aeruginosa
ttagaatttttcgccgcgggcacgcaggtcagccaggacggcctcgatgccacgcttgtcgatgatacgcatgcccttggcggaaacgcgcagacgtacgaagcgcttctcggactcgacccagaaacggtggtgctgcaggttcggcaggaaacggcggcgggttttgttgtgtgcgtgggaaatgttattcccggtaaccggacccttaccggttacttgacagactctagacat

SEQ ID NO: 661 - DNA, 75 bp, Pseudomonas aeruginosa
caggggcgtcgccaagcggtaaggcagcaggttttgatcctgccatgcgttggttcgaatccagccgcccctgcc

SEQ ID NO: 662 - DNA, 615 bp, Pseudomonas aeruginosa
atggtcgactttattctgaatgcccaagtgcgttccgatctggggaaaggtgcgagccgccgcctgcgtcgtaacgccggtctggttcctgctgtcgtttacggcggcgacaaagagccccagtccgtaaccctggaactgcgcgaaatcgccaagctcctggaaaacgaggctgccttcagccacgtgatcgccctgaacgttggcggcgccaaggaaaccgtactgatcaaggccctgcagcgccatccggcgaaaggcttcgtgatgcacgccgacttcctgcgcgtggtcgccgaccacaagctgaccgcccacgtaccgctgcacttcatcaacgaagaagtagccgttggcgtcaagcaagccggtggcgagatctcccacaccatctccgaagtcgaagtttcctgcctgccgaaagacctgccggaattcatcgaagtcgacatggccaaggtcgagctgggccagatcgttcacctgtcggacctcaaggctccgaaaggcgtcgagctggtacaactggcccacggcaacgacctggccgttgccaacatccacgcttcccgcgtggtgaaggaagaaggtagcgaagaaggcgccgccgagtaa

SEQ ID NO: 663 - DNA, 501 bp, Pseudomonas aeruginosa
ttaggcggcagcagcttctttctggtcgcgaatggccgccagagtacgagccagcttgctggtagcgccttgaatcacgctcatcagctgcgatacggcttcgtcgtaggtcggcaggcttgccagtacgtcgatctgattggctgcgaggaactgaccctcgaaggcagccgccttgatctcgaacttgtcctgacccttggcgaactcacggaagatacgagcggcagcgcccggatgttcgttggagaaagcgatcagggtcgggcctttgaacacgtcgttgagcacgtcgaactgggtgccttcaacggcgcgcttgagcagggtgttacgtacgactttcacgtacacaccagcttcgcgggcctctttacggagtccggtcatggcgcctacggtcacgccacgggcatcggccacgacagcggacagggcagctttggcagcctcgttgacttcagcgacgatggccttcttgtcttcgagtttaattgccac

SEQ ID NO: 664 - DNA, 219 bp, Pseudomonas aeruginosa
atgtcgaaagaagacagcttcgaaatggaaggtactgtcgtcgacaccctgcccaacaccatgttccgtgtggagttggaaaatgggcacgtcgtcaccgcgcacatctccggcaaaatgcgcaagaactacatccgcatcctcaccggcgacaaggtccgcgtggaactgacgccctacgacctgagcaagggccgcatcacctaccgcgcccgctga

SEQ ID NO: 665 - DNA, 357 bp, Pseudomonas aeruginosa
ttacttgcggatcggcttacgcgggcccttgcgggtacgcgcgttggtcttggtacgctgaccgcgaaccggcagaccgcgacgatgacgcagaccgcggtagcaaccgaggtccatcagacgcttgatgttcatgttgatttcgcgacgcaggtcaccttcggtggtgatcttcgcgacttcgttacgcagctgatcgatctgctcgtcgctcaggtccttgatcttggcagccgggtttacgccggtggctgcgcagatgctctgagcagtagtgcgaccaacaccatagatgtaggtcagcgagataacagtgtgcttgttatccggaatgttgacgcctgcaatacgggccat

SEQ ID NO: 666 - DNA, 291 bp, Pseudomonas aeruginosa
atggcgcttgaacgctccgacgtggaaaaaatcgcccatctcgcccgcctgggcctgagcgaggccgatcttccgcgcaccaccgagaccctgaacaacatcctcggcctgatcgaccagatgcaggcggtcgacaccagcggcgtcgaaccgctcgcccatccgctggaagccacccagcgcctgcgcccggacgcggtcaccgagaccgatcaccgcgacgcctaccagaccatcgcccccgccgtggaagaaggtctgtacctggttccgaaagtcatcgagtcataa

SEQ ID NO: 667 - DNA, 552 bp, Pseudomonas aeruginosa
ttactttttcttcttgggagcgatgaccatcatcagctggcgtccttccagcttaggatgctgctcgacggtgccgtactccacgaggtcggcttcgacccgcttcaacagctccatccccagctcctggtgagccatctcacggccgcggaatcgcagggataccttggccttgtccccttcactaaggaaacgtaccaggttgcgtagttttacctggtaatccccttcttccgtccctggacgaaacttgatttctttgacctgcgcctgcttctggttcttcttggcgaccgcagcctgcttcttcttctcgaacaggtgcttgccgtagtccatgatgcggcagacaggaggcaccgcgtcggccgaaatctcaaccaggtccagcttcgcctcttcggctaggcggatcgcctcatcgatcgaaacaacaccaacctgctggccatcagctccaatcaaccgtacctcacgagccgagatgttctcgttgatcgggggtttcggttgagctcgcttatcctgtctcatttcacgcttaataatgat

SEQ ID NO: 668 - DNA, 351 bp, Pseudomonas aeruginosa
ttagaccagtttttccttgatgcgcgcggccttgccggacagggcgcggaggtagtacagcttggccttgcgcacgtcgccgcgacgcttgacgctcaggctgtcgacgatcgggctgtaggtctggaaggtacgttccacgcccacgccgttggagatcttgcgcacggtgaaggcgctgttcaggccacggttgcgcttggcgataacgacgccttcgaaggcctgcagacgctgacggtctccttccttcaccttgacctggacgatcacggtatcgccgggggcgaacgccgggatctctttgttcatctgttcagcttcgatctgctgaatgatcttgttggtcat

SEQ ID NO: 669 - DNA, 294 bp, Pseudomonas aeruginosa
ctacttcttcaccatccactggatggttgcctggtagtcttcggcactgcagtcggtgcacaggccgcggggcggcatggcgttgaatccgttggtcacatgctggaccagggtcggcatgcccttggccagccgcggctcccaggcggcatggtcgccctttttcggcgccatcggcagctggccgtcgtgacacgcgccacaggtccggttgaacactgcttccgggtcctgcgccgcctgcgccgtaacggccaccgcaacgactgtcgctgcgagcagcagtttcttcat

SEQ ID NO: 670 - DNA, 1002 bp, Pseudomonas aeruginosa
tcaggcagtggccttgtcgtctttcttaagacttgccggcggccagttatcgaggcgcataccgagggacagaccacgggaagccagaacgtccttgatttcggtcagggacttcttgcccaggttcggcgttttcaacagttccacttcggtgcgctggatcaggtcaccgatgtagtagatgttttccgccttcaggcagttggccgaacgtacggtcagttccaggtcatcgaccgggcgcaggaggatcggatcgatctcgtcttcctgctcttcaacgacgggttcgctgtcgcccttgaggtccacgaacgctgccagctgctgttgcaggatggtagcggcgcgacggatagcctcttcgggatccagagtgccgttggtttccaggtccaggaccagtttgtccaggttggtgcgctgctcgacacgggcgttttccaccacgtaggagacacgacggaccgggctgaacgatgcgtcgagctgcagacggccgatgctgcggctttcgtcttcatcgctctgacgtgcgtcggcaggctcgtagccacggccacgagctaccttcagcttcatgttcagcgcgccgttgtctgccaggttggcgataacgtggtcaccgttgatgatctcaacatcgtgatccagctgaatatcggcagcagtcacaacacccgagcccttcttagccagggtcagcgtcacttcatcacgaccgtgcagcttgatggccagacctttcaggttcagcaggatctcgattacatcttcctgcacaccttcgatcgccgagtactcgtggagtacgccgtcgatctcggcctcgaccactgcgcagccaggcatggaggacaacaggatgcgacgcagcgcgttgcccagggtgtgaccaaaaccacgctcgagaggctcgagcgtgatcttggcgcgggtttgactgaccacctgcacatcgatgtggcggggggtcaggaactcatttaccgaactctgcat

SEQ ID NO: 671 - DNA, 522 bp, Pseudomonas aeruginosa
atgcatccacccctccaagccctggtcatcatgggtgtcgccggttgcggcaagtccagcgtcagccaggccctttgccagcgcagcggcgcccacggcatcgaaggcgacagcttccatcccgccgccaacatccgcaagatgagcgccggcattcccctcaccgacgacgaccgcgccggctggctggacaccctcgccgagcagctgcgccaggcggtggccgccggcaagctgccggtactgacctgttccgccctcaagcgcgcctaccgcgaccggttgcgccgcgcggtgcccggcctcggcatcgtctacctggaactgaccccggcggtcgccgccgagcgcgtcgcccagcgccccggccacttcatgccggcgaccctgatcgacagccagttcgccgccctcgagccgccgctcgacgaacccctgaccctgcgcctggacgccaccctgccggtggaatgcctggcgcaggccgcccacgcctggtggctggagcacgccgccgcctga

SEQ ID NO: 672 - DNA, 141 bp, Pseudomonas aeruginosa
atgaagcggctgttcctgtccttcgtcgcgctcgccctcctcgccggctccatcgccgcctgcggccagaaaggcccgctgtacctgccggacgacgaaaaagccaagaaagaacacagcaaagaccgctacggtttctga

SEQ ID NO: 673 - DNA, 759 bp, Pseudomonas aeruginosa
ttaactatcgtcccgctgacggatatattccgccagcagcttctgctcttctccagaaagcgagcggctatccagaagatcggcgcgtcgttcccaggtccgcccaagggcctgctgcaaacgccaacgccggatgtgttcatggttgccactgagcaacacttcaggaacacgtttgtccgcgtacacctcgggtcgggtgtagtgcgggcagtcgagcaggccatccgtgaaggagtcctcctcggcggaatctgcatgacccaatgcaccgggcagcaaccgcgtcactgcatcgaccagcaccatggccggcaactcaccgccggacaggacataatcgccgatcgaccattcttcatcgacgtgctcttcgatgaagcgctcgtcgatgccttcgtagcgcccggcgatgaggatcaacgcttcctcttcggccagttcgcgtacgcccgcctgcgtcagctggcggccttgcggcgaaaggtagatcaccttcgccttcctgcccccggcggcttgcctggcatccgccagcgcgccctccagaggcttgatcttcatcaccatgccagggccaccgccgaagggccggtcgtccaccgtctggtggcggtcctcggtgtagtcccgtggattccagcaggtcagcgtgagcaacccctgctttaccgcacggctggtgatgccatagtcactgatcgcgcggaacatctccggaaagatgctgacgacgcccacccacaaacgcttgtccat

SEQ ID NO: 674 - DNA, 1782 bp, Pseudomonas aeruginosa
atgactgcagactccgctctgtacatcccgccttacaaggcagacgaccaggatatcgtcgtcgaactgaactcccgctttggcgccgagaccttcaccgtccagcccacccgtaccggcatgccggtgctctgggttccgcgcgaaagactgatcgaagtcctgaccttcctccgtcaggtacccaagccctacgtgatgctctacgacctgcacggcgtcgacgagcggttgcgcacccatcgccgcggcctgccgagcgccgacttcagcgtgttctaccacctgatgtcgctggagcgtaatagtgacgtgatgatcaaggtcgccttgtccgagcgcgacctcaacctgcccaccgccacccgtatctggcccaacgccaactggtacgagcgcgaagtgtgggacatgtacggcatcaccttcaccggccacccgcacctgacccgcatgctgatgccgccgacctggcagggccatccgctgcgcaaggactacccggcgcgcgccaccgagttcgatccctactccctgtccgccgccaagcaggacctggagcaggaagccctgcgcttcaagccggaagactggggcatgaagcgccacggcgagaacgaggactacatgttcctcaacctcggcccgaaccacccgtccgcccacggcgcgttccgcatcatcctgcaactggacggcgaggagatcatcgactgcgtcccggagatcggctaccaccaccgcggcgccgagaagatggccgagcgccagtcctggcacagtttcatcccctacaccgaccgcatcgactacctcggcggggtgatgaacaacctgccctacgtactctcggtggagaagctcgccgggatcaaggtgccccagcgggtcgacgtgatccggatcatgatggcggagttcttccgtatcctgaaccacctgctgtacctgggcacctatatccaggacgtcggcgccatgaccccggtgttcttcaccttcaccgaccgccagcgcgcctacaaggtggtcgaggccatcaccggcttccgcctgcacccggcctggtaccgcatcggcggcgtcgcccacgacctgccgcgcggctgggacaagctggtccgcgagttcctcgactggatgcccaagcgcctcgacgagtacgagaccgcggccctgaagaacagcatcctgcgcggccggaccatcggcgtcgcccagtacaacaccaaggaagccctcgagtggggcaccaccggcgccggcctgcgcgccaccggttgcgacttcgacctgcgcaaggcccgcccctactccggctacgagaacttcgagttcgaggtaccgctggcccacaacggcgacgcctacgaccgctgcatggtcaagatgggcgagatgcgccagagcctgcggatcatcgaacagtgcctgaagaacatgccggaaggcccttacaaggccgaccatccgctgaccacgccgccgccgaaagaacgcacgctgcaacacatcgaaaccctgatcacccacttcctgcaggtttcctggggcccggtcatgccggccaacgaagccttccagatgatcgaggcgaccaagggtatcaacagctactacctgaccagcgacggcagcaccatgagctaccgcacgcgtatccggacgcccagcttcgcgcacctgcaacagatcccctcggtgatcaacggcagcatgatcgcggatctgatcgcctacctgggtagcatcgatttcgttatggctgacgtggaccgctga

SEQ ID NO: 675 - DNA, 1311 bp, Pseudomonas aeruginosa
atgcaagtttctgttgaaagcacttccgctcttgagcgccgcatgaccgttggtgtgcctgccgagcgtatcgagaccgaagtcaacaagcgtctgcagcagaccgcccgtcgtgccaagattccaggtttccgccccggcaaggtgccgatgagtgtcattcgtcagcgctacgaagcttccgcgcgccaggaagccatgggcgatctgatccaggaaaccttctacgaagccgtggtcgagcagaagctgaatccggccggttcgccgtcggtagagcccaagtccttcgagaaaggcaaggacctggaatacatcgcaaccttcgaagtcttcccggaatttaccgtttccggcctggaagacatcaaggtcgagcgcctgcaggccgaagtttccgatgctgatgtcgacaatatgctcgacgtcctgcgcaagcagaacacccgtttcgaagtagtcgagcgtgccgcccagaacgatgaccagttgaacatcgacttcgtcggcaagatcgacggcgaagccttcgccggcggttccgccaaaggcaccctgctggtactgggctccggtcgcatgatcgccggcttcgaagaagggctggtgggggcgaaggccggtgaagagcgtgtgctcaacctgaccttccccgaggactaccagaacctggacctggccaacaaggctgccgagttcaccgttaccgtcaatagcgtagccgagcccaagctgccggaactgaacgaagagttcttcgctctgttcggcgtgaaggaaaccggtctcgatggcttccgcgccgaagtgcagaagaacatggagcgcgagctgcgccaggcgatcaagtccaaggtcaagaaccaggtcatggaaggtctgctgcaggccaacccgatcgaagtgcccaaggccctgatcggcaacgaagtgaaccgtctgcgcgtgcaggccgtccagcagttcggcggcaacatcaagcctgaccaactgccggccgagctgttcgaagagcaggccaagcgccgtgtggtgctgggcctgatcgtcgccgaagtggtcaagcagcacgagctgaaggccgacgaaggtcgcgttcgcgaaatgatcgaggaaatggcctcggcctaccaggagcccgagcaggtcgtcgcctggtacttcaagaacgagccccagctgaacgaagtccgttctgttgtactggaagaacaagtcgtagatactgtcctgcaaaaggccactgtgaccgataagcaggtatcctacgaagaagcggtcaagccggccgaagctccgcaagcggcctga

SEQ ID NO: 676 - DNA, 861 bp, Pseudomonas aeruginosa
ttacaccgcggcagcgccgccgacgatttccgagatttcctgggtgatcgccgcctgacgcgccttgttgtagatcagctgcaaatcgctgatcagctcgccggcgttgtcggtagcgttcttcattgcaatcatccgggccgcctgctcacaggcgttgttctcaaccacggcctggtacacctgggattccacgtaacgcaccagcagcccgtcgaggagcgacttggcgtcgggttcgtagagatagtcccagtggtgcttcagctcctgatcgtcatcggccaccagcggaatcagctgttccacggtcggcttctgggtcatggtgttgacgaacttgttggagaccacgaacaggcgatcgatacggccttcgaggtatgcgtcgagcatcaccttgacactgccgatcaggtcgttgatcgaaggctcttcgccgaggtggctgatagctgccacgacgttgccgccgaaactgcggaagaacgaagcgcccttgctaccgatcacgcaaaggtcgatttccgccccttgctcgcggtagccgctcatgtccttgacgagggacttgaacaggttgatgttcagaccgccgcacagaccacggtcactgctcaccacgatgtagccgacgcgcttgacttcacgctcgaccatgaacgggtgacggtattccgggttggcgttggccagatggccgatcacctggcgaatacgctccgcgtagggacggccggccgccatgcgcatttgtgccttgcgcatcttgctcaccgccactttttccatggcattggtgatcttttgcgtgcttttgatgctcgcaatcttgctgcgaatctcttttgcgcctgccat

SEQ ID NO: 677 - DNA, 183 bp, Pseudomonas aeruginosa
ttactcgtcggagcccttgtctactaccttacggccgcgatagaagccgtccggggatacgtggtggcgcaggtggacttcaccggtgctcttttccacggacagagcattggactcgagcgcatcgtgggaacgacgcatgtcacgagcggaacgagactttttgttctgctgaacagccat

SEQ ID NO: 678 - DNA, 369 bp, Pseudomonas aeruginosa
atggtaactaacgtcacaaacttctcgcgctccggcctctacgactggatggcccagcgcgtttccgcggtcgttctcgcggcttatgtcattttcctgctgggctacctcattgctcaccccaacatttcctacgcggactggcacggcctgttctcgcagggttggatgcgcatcttcagcctgttgaccctggttgccctgagcgtccatgcgtgggtcggtatgtggaccatctccaccgactacctgacttcgatggctctcggcaaggcggcgacagtcgtgcgtttcctcttccaggcggtttgcggcatggcgatgttcgcattcttcgtctggggtgtgcagattctttggggtatgtga

SEQ ID NO: 679 - DNA, 501 bp, Pseudomonas aeruginosa
ttagagaatctcctcgacgctcttgccacgcttggccgctactgcttccggagcctgcatgttcttcaggcccttgaaggtggcgtaaaccacgttcaccggattggtggagccatagcacttggccaggacgttctgcacaccagccacttccagaacggcacgcatggcgccgccggcgatgatgccggtaccttccgaagccggctgcatgtacaccttggaggcgccatgggcggacttggtcggatactgcagggtggtgccgttcagatcgacttggatcatgttgcggcgagcggcttccattgctttctggatggcggccggcacttcacgcgccttgccacgaccgaaaccaacgcgacccttgccatcacccaccacggtcagtgcggtgaaagcgaagatacggccaccttttacggttttggcgacgcggttaacctgaaccagcttctcgatgtagccttcgtcgcgcttttgctcgttgtttgccat

SEQ ID NO: 680 - DNA, 216 bp, Pseudomonas aeruginosa
tcagtacaggcgctcgcgacggcgctgttcgcgctgtactttcttcgcgtggcgcttcactgcggcagcggccttgcgcttgcgctcggcagtgggcttctcgtagaactcgcggctgcgaacttcagccagtacacctgctttttcgcaggagcgcttgaaacgacgcagggctacgtcgaagggttcgttctcttttactttgacggctggcat

SEQ ID NO: 681 - DNA, 1596 bp, Pseudomonas aeruginosa
atgtccgcatatcagaacgagatcaaggcagttgccgcgctgaaagagaagaacggcagcagctggagcgcgatcaaccccgagtacgcagctcgcatgcgtatccagaaccgcttcaagaccggcctggatatcgccaagtacaccgcggccatcatgcgcaaggacatggccgaatacgatgcggactcctccgtctacacccagtcgctgggttgctggcacggcttcatcgggcagcagaagctgatctcgatcaagaagcacctgaagaccaccaacaagcgctacctctacctgtccggttggatggtcgccgcgctgcgctccgacttcggcccgctgccggaccagtccatgcacgagaaaaccgcggtttccggcctgatcgaagagctgtacaccttcctgcgccaggctgacgcccgcgagctggacctgctgttcaccggcctggacgctgcccgcgccgctggcgacaaggccaaggaagccgagctgctggcccagatcgacaacttcgaaacccacgtggtgccgatcatcgccgacatcgacgccggcttcggcaacgccgaggcgacctacctgctggccaagaagatgatcgaagccggcgcctgctgcatccagatcgagaaccaggtgtccgacgagaagcagtgcggccaccaggacggcaaggtcaccgttccgcacatcgacttcctcgccaagatcaatgccgtacgctacgccttcctcgagctgggcgtggacgatggcgtgatcgtcgcccgtaccgactccctgggcgccggcctgaccaagcagatcgccgtgaccaacgagccgggcgacctgggcgacctgtacaactccttcctggattgcgaagaaatctccgagtccgagctgggcaacggcgacgtcgtgatcaagcgcgaaggcaagctgctgcgtccgaagcgcctggcttccaacctgttccagttccgcaagggcaccggcgaagatcgctgcgtcctggactgcatcacctcgctgcagaacggcgccgacctgctctggatcgaaaccgagaagccgcacgtcggccagatcaaggcaatggtcgatcgcatccgcgaagtgattccgaacgccaagctggtctacaacaacagcccgtccttcaactggaccctgaacttccgccagcaggtgttcgatgcgttcgtcgccgaaggcaaggacgtttccgcctacgaccgcaacaagctgatgagcgtcgagtacgacgacaccgagctggccaaggtcgccgacgagaagatccgcaccttccagcgcgatggctcggcccacgccggcatcttccaccacctgatcaccctgccgacctaccacaccgccgcgctgtccaccgacaacctggccaagggctacttcgccgacgaaggcatgctggcctacgtgaagggcgtgcagcgccaggaactgcgccagggcatcgcctgcgtcaagcaccagaacatggcgggctccgacatcggcgacaaccataaagagtacttcgcaggcgaagccgctctgaaggccagcggcaaagacaacaccatgaaccagttccactaa

SEQ ID NO: 682 - DNA, 387 bp, Pseudomonas aeruginosa
gtgaaaaaagccgtgaatagcaaacgacctgtaaacctagacctaaggaccatcaaactccctgtcaccgcttacacgtccattctccaccgtatctctggcgtcatcctgttcctcggtattgccgtgctgctgttcgcgctcgacaagtcgctgagttcggaagaaggcttcgagcaggtgaaggcgtgcctgaccagtcccctggccaagctggtgatctggggcctgctgtctgcgctgctgtaccacctggtggccggtgttcgccacctggtcatggacgctggcgtcggcgagacgctggaaggcggtaagcgtggctccaaaatcgtcatcgccatcgcggtggtgctgatcgttctggcgggggtatgggtatggtaa

SEQ ID NO: 683 - DNA, 537 bp, Pseudomonas aeruginosa
tcaagatttcaacgcttcggccagtttcgcgagcttgccgcgcaccgagccatcgattaccaagtcaccggcgcgaatgatcacgccgccgatcaggctcgcgtcttccgacgcatgtagccgcacttcgcgactgagccgggcgctgagagccttggcgagtttgtcctgctgttctttgctcaaggtgaaggcactggtgacttctacctcgaccgacttttcctgctcggccttcaactgctcgtacatctcagcgatggtcggcagcagttcgagccgcttgttctcagccacagtccggacgaagttctgggctggtgcattcagcttgtcgccgcacacatcgatcaggctctgggccttggccgaagaggtcagctgaggctctttgagcagctggcgcacggtgtcgtcctgcgacactgcggccagcacacccagcgcagccgaccaatcggccagttgctgatgagcctgggcgtactcgaaagccgcctttgcgtagggacgagccaacgtggtcagttctgccat

SEQ ID NO: 684 - DNA, 74 bp, Pseudomonas aeruginosa
ctggagcgggtagcgggaatcgaacccgcatcatcagcttggaaggctgaggttctaccactgaactatacccg

SEQ ID NO: 685 - DNA, 573 bp, Pseudomonas aeruginosa
gtggacattctcaaagacaaaatccgctcggaaggcatcgtcctttccgagcatgtactcaaggtcgacgcctttctcaaccaccagatcgacccgcagctgatgcagcaggtcggtcacgcattcgccacgcgcttccgcgaccagggcatcaccaagatcgtcaccatcgaggcttccggcatcgccccggcggtcatggccggcctggagctgggcgtcccggtgatcttcgcccgcaagtaccagtcgctgaccctgaaggacaacctgtacatctccaaggtgttctccttcaccaagcagaccgagagcaccatcgccatctcggccaagcacctgaacgcccacgaccacgtgctggtgatcgacgacttcctcgccaacggccatgccgccaaggcgctgatcgacctgatcggccaggccggcgcgagcatcgccgggctcggcatcgtcatcgagaaatccttccaggatggccgcgccctgctggaaagcgaaggctaccgggtcgagtccctggcccgggtgaaatcgctggccggcggtcaggtcgagttcctcgactga

SEQ ID NO: 686 - DNA, 444 bp, Pseudomonas aeruginosa
atggcgaccctcctcgtattgcacgggccgaatctgaacctgctgggcacccgcgagcccggcacctacggttcgaccaccctcgggcagatcaaccaggacctcgagcgccgcgcccgcgaagccggccaccacctgctgcatctgcagagcaacgccgaatacgaactgatcgaccggatccatgccgcgcgcgacgaaggcgtggacttcatcatcatcaatccggcggcattcacccataccagcgtcgcgttacgtgacgcgctgcttgcggtgagcatcccattcatcgaagtgcacctgtcgaacgtgcacaaacgtgaacctttccggcatcactcctacttctccgacgtggcggtaggggtgatctgcggtctcggcgccacaggctaccgcctggccctggaatccgcccttgaacaacttcaacgcccctga

SEQ ID NO: 687 - DNA, 249 bp, Pseudomonas aeruginosa
atggccgaacataacgtgcagtcccccttgcccggcaccttctatcgcaaggccagccccgacgcgccgccctacgcggaggtcgggcaggcggtcgaggccggcagcgtgatcgggctgatcgaggtgatgaagcagttttccgaagtgcaggccgggcaggccggcatactccaggcgttccacgtggaagatggcgaggccatcgagccgggccaggtgctggcggtgatcgccagcgctacctga

SEQ ID NO: 688 - DNA, 210 bp, Pseudomonas aeruginosa
atgtcgaatcgtcagaacggcaccgtaaaatggttcaacgacgccaaaggcttcggcttcatcaccccggaaagcggtaacgacctgttcgttcacttccgttccatccagggcaccggcttcaagagcctgcaggaaggccagaaggtttccttcgtggtcgtcaacggccagaaaggcctgcaagccgacgaagtacaagttgtctaa

SEQ ID NO: 689 - DNA, 471 bp, Pseudomonas aeruginosa
ttagaaccggtagtgcgagaaggccttgttggcctctgccatacggtgcacgtcttcacgcttcttgactgctgcgcccttgccttcagcggcatccagcagctcgccagccaggcgcagagccatggacttctcgccacgcttgcgggcgaagtccaccagccaacgcatggccagggcattacgacgggacggacggacttcgaccggaacctggtaagtcgcaccacctacgcggcgggacttcacttcgaccagcggagcgatggcatcgagagctttttcgaaggtttccaggggatcggccttgccgcgttccttcaccttgtccagcgcaccgtaaacgatacgctcggcaacggctttcttgccgctttccatcacgtggttcatgaacttggccaggatctggcttccgtatttcggatcagccagcacttcacgcttggccgctacacgacgtcttggcat

SEQ ID NO: 690 - DNA, 756 bp, Pseudomonas aeruginosa
tcagcttcccgcggcacgacagatcgcgccgaactcatccgcattgagggaggctccacctaccagccccccatcgatatccggcatgccgaacaactcggctgcacttgccgcctttacactgccgccgtaaaggagtcgcacaccttttgcgacctcggcattttccgctgccagttgcgcgcggatcgccgcgtgcacttcctgggcttgcgcgggggacgcggtcaacccggtcccgatcgcccagaccggctcgtaagccacgactgcgcgagcaaaagctccaacacccaactcgtcgatcacgcttcccagctgccttgcgacaacctccagcgtcttgcccgcctcgcgctccgcccgggtctccccgacacacagcaccggcaccaggccgcacgactgagccgcggcaaacttgcgactcacaacctcgtcactctcgccgagaatcaggcgacgctccgagtggcccacaaggaccatgctacaaccgacatccgccaactgactgggagcagtctcaccggtcagcgcgccttgcatcggctcgacggcgctgttctgcgcacctacatcgatcgccttgccggccaggccctggatgacctggctgatgaacaagcaaggcggcatcacagccacatcgactccgctcggcaacgccagctgacgcaagcctttgatcaactcggccacactggaatgcgtaccgtgcattttccagttaccggccaccaagggtcgacgcat

SEQ ID NO: 691 - DNA, 471 bp, Pseudomonas aeruginosa
atggacattcgtaaagtcaagaaactgatcgagctgctggaagagtccggtatcgacgagctggaaatccgcgaaggcgaagagtcggtacgcatcagccgccacagcaagaccgccgcccagccggtgtacgcacaggctccggccttcgccgctccggtcgccgcgccggcgccggcagccgccgctccggccgccgctgccgcggaaagcgccccggccgctccgaagctgaacggcaacgtggttcgctcgccgatggtcggcaccttctaccgcgccgcctcgccgacctcggccaacttcgtcgaagtcggccagagcgtgaagaaaggcgacatcctgtgcatcgtcgaagccatgaagatgatgaaccacatcgaagccgaagttagcggcaccatcgagtcgatcctggtggagaacggccagccggttgagttcgaccagccgctgttcaccatcgtctaa

SEQ ID NO: 692 - DNA, 76 bp, Pseudomonas aeruginosa
ttggtgggtgatgacgggatcgaaccgccgaccctctgcttgtaaggcagatgctctcccagctgagctaatcacc

SEQ ID NO: 693 - DNA, 393 bp, Pseudomonas aeruginosa
ttagaacacagtgcagagcacttcgccgccaacaccagcagcacgggcagcacgatcggtcatcacacctttgttggtggagacgatcgacacaccgaggccgccacgaactttcggcagttgctcaacggatttgtactgacgcaggccaggacggctgatgcgcttgacctcttcgatgacaggcttgccttcgaagtacttcagttcgatggacagctggggttttacttccgagctgatctggaaatccgcaatatagccttcgtccttcaggactttggctaccgccgctttcagtttcgaggacggcatgcttacgacggtcttttcagccatctgggcattacggatgcgagttagcatgtctgctaacgggtcctgcatactcat

SEQ ID NO: 694 - DNA, 549 bp, Pseudomonas aeruginosa
atgtcgggtcccacggacacatctacccaacctcaaggattttccatgacccgtcttcgcctcatcggcagcgccgtgctgctcagcctcagctccatggccatggccgattccgccagccaggccgagcaattcctcaagctggtccatgccgacaagctgacggtcccggtctatgcccaggtgcagcagatgctggcccagcgcttcgcccaggccaaggcgccggagagcaagaaggcggttctcgagcgttaccaggccaaggccaatgccgaactggaccgcgccatcggctgggacaagatcaagcccgagctgatcaagctctacaccaccaacttcaccgagtccgagctgaaggacctgaatgccttctaccagtcgccgctgggcaagaaggtgctggagaagatgccgcgcctgaccgccgaatccgcccaactgacccaggccaagctgcaaggcgccgtcgagccggtgaacaagctgatggccgacatggacaaggaactcggcgtcgccgcgccggcccagaagaaaaagtga

SEQ ID NO: 695 - DNA, 408 bp, Pseudomonas aeruginosa
ctatgcatgagtaccgtcggccacgccaggggcgtcagcagggctttccgtgcgaggtcgattgcgcaacaggcgtttccagagcttgccgaactgctggtgcagctccggattttccagttcgcccaggcctttgcgcgcgatcaccacgatatcccagccagccagggtttcctggttatggcggaacgattcgcggatcaggcgtttgaggcgattgcgctggacggcgagcttgacgttcttcttgccgatcaccaggcccaggcgggggtgatcgagaccgttctcgcgcgccagcagcaggacgtgcttgccggggaccttgccggtcggagagtcgaagactgcgctgaattgccgggctgtcagtagacgcttgtcccggtcgaagtcccgactcaccac

SEQ ID NO: 696 - DNA, 1017 bp, Pseudomonas aeruginosa
atgttggtgatgcgccccgcccaagcggccgacctgccacaggtgcagcgtctggcggcggacagcccggtaggcgtcacgtccttgccggatgacgccgaacgcctgcgcgacaagatcctcgcttccgaggcctcgttcgccgcggaggtgagctacaacggcgaggaaagctatttcttcgtcctcgaggacagcgccagcggcgaactggtcggctgctcggcgatcgtcgcctcggccgggttctcggaaccgttctacagcttccgcaacgaaaccttcgtgcacgcctcgcgctcgctgtcgatccacaacaagatccatgtcctctcgctgtgccacgaccttaccggcaacagcctgctgaccagtttctacgtacagcgcgacctggtgcagagcgtctacgccgaactcaactcgcgcggtcgcctgctgttcatggccagccatccggagcgcttcgccgacgcggtggtggtggagatcgtcggctacagcgacgagcagggcgaatcgccgttctggaacgcggtcgggcgcaacttcttcgacctgaactacatcgaggcggaaaagctctccgggctgaagagccgcaccttcctcgccgaactgatgccgcactatccgatctatgtgccactgttgccggatgccgcccaggagtccatgggccaggtccacccgcgagcgcagatcaccttcgatatcctgatgcgcgaaggcttcgagaccgacaactacatcgacatcttcgatggcggcccgaccctgcacgcgcgtacctcggggattcgctcgatcgcccagagccgggtggttccggtgaagatcggcgaggcgccgaagagcgggcgtccatacctggtcaccaacggccagttgcaggacttccgcgcggtcgtgctggacctggactgggcgcccggcaagccggtggccctgagtgttgaagccgccgaggccctgggcgtcggcgaaggcgccagcgtgcgcctggtcgcggtctga

SEQ ID NO: 697 - DNA, 1212 bp, Pseudomonas aeruginosa
tcagccagtcaccctttccggaaccggtttggtcttctccatccgggtgtagaacggcatcaggatgaagaaggcgaaatacaggacggtgcaaacgcgcgacagggtagtacccagcgggctcggagcctgggcgccgtagtagccgaggatcacgaaggacaccgcgaagatcaccagccacagcttgctcagccagcccttgtagcggatcgagcgaaccgggctgcgatccagccacggcaggacgaacagcacagcgatcgccgcacccatcgccaccacgcccatcagcttgtccggaaccgcgcggaggatcgcgtagaacggggtgaagtaccagaccggagcgatgtgctcgggggtcttgaactggttggccatctcgaagttgggcttctcgaggaagtagccgcccatttccgggaagaagaagatcacggtgcagaagatgaacaggaacaccaccacgccgacgatgtccttcacggtgtagtacggatggaacgcgatgccgtccagcggtacgccgttctcgtccttcttcttcttgatgtcaacgccgtccgggttgttcgaaccgacttcgtgcagcgccaggatgtgcagcacgaccaggccgagcaggacgatcggcagggcgatcacatgcaaggcgaagaagcggttcagggtgatgccggagatcaggaagtcaccgcggatccactgggccaggtcttcgccgaccaccggaatcgcgccgaacagggaaatgatcacctgggcgccccagtaggacatctgaccccaaggcagcaggtagcccatgaaggcctcggccatcagcgccaggtagatcagcatgccgaagatccacaccagctcgcgcggcttctgataggagccgtagagcaggccgcggaacatgtgcaggtagaccacgatgaagaacgccgatgcaccggtggagtgcatgtagcgaatgatccagccgtagtcgacatcgcgcatgatgtattcgacggaagcgaacgcctcttcggccgacggcgtgaagctcatggtcagccagatgccggtgaggatctggttgaccagcaccagcagcgccagggagccgaagaaataccagaagttgaagttcttcggtgcgtagtacttgctcagatggtcttcccacatcttggtcgcgggaaaacgcgcatcgacccaagccatgaacttgttcat

SEQ ID NO: 698 - DNA, 420 bp, Pseudomonas aeruginosa
ttactcgtcagcgttatcgctatcgctgttgtcgtcgccatcggcgccttcagcgttatcgttcggacgctcacgacgctcgcgacgctcgttgcggctttcttcagccttgagcatctcggactgctcggtgacagcttcgtcgcgacgcatgaccaggttacggatcacggcatcgttgtaacggaagttgtcttccagctcagccagggccttggcgctgcactcgacgttcatcagaacgtagtgggccttgtgcacgttgttgatggcgtaggccagctgacgacggccccagtcttccagacggtggatcttgccgccgtcttcttcgatggccttggtgtaacgctcgaccatgccaccgacttgttcgctctggtccgggtgaaccaggaacacgatttcgtaatgacgcat

SEQ ID NO: 699 - DNA, 528 bp, Pseudomonas aeruginosa
atgagctacagcaagatcccggccggcaaggacctgccgaacgacatctacgtcgctatcgagattccggccaaccatgcgccgatcaagtacgagatcgacaaggacaccgactgcctgttcgtcgaccgtttcatggccaccccgatgttctacccggccaactacggcttcatcccgaacactctggccgacgacggcgacccgctggacgtgctggtggtgaccccctatccggtcgctcccggttcggtgatccgcgcgcgcccggttggcgtcctgcacatgaccgacgaggcaggcggcgacgccaagctgatcgccgtgccgcacgacaagctgagcgtcctgtacaaggacgtgaaggaatacaccgacctgccggccctgctgctggaacagatcaagcacttcttcgagaactacaaggatctcgagaaaggcaagtgggtcaaggtcgaaggctggggcaacgccgacgccgcccgcgccgagatcaccaaggccgtggccgcgttccagaagtaa

SEQ ID NO: 700 - DNA, 1923 bp, Pseudomonas aeruginosa
ttactccgagtcttggcgaccacgccgggaaaccgcctgtgccaacagctcagcgaactgggtgacgggcatggagcccaggtcttccccttcgcgcgtacgcaccgcgacggccttcgattcaacttcccgatctccaataaccaagagatagggaaccttgagcaaagtatgctcgcggattttaaagccgatcttctcgtttctcaagtcggacttggcacggaatccgctttccccgaggatccgcaccacctcggcggcgaaatcggcctgcttgtcggtgatgttcatcaccactgcctgggtcggcgccagccaggccgggaaggctccggcgtagtgctcgatgagcatgccgatgaagcgctcgaaggacccgaggatcgcacggtgcagcatcaccggacgcttacggttgttgtcctcggcgatatagctggcgtccaggcgctccggcaggttcgggtcgtactgcagggtgccgcactgccagttacggccgaggcagtccttcagggtgaactcgatcttcggcccgtagaacgcgccctcgcccggctggtattcccaggccaggccggattcgttcagcgcatcggccagcgcgccttcggcgcgatcccacagctcgtcggaaccgacgcgcttggccggacgggtcgacagcttcatggcgatgtcggtgaaaccgaagtcgcggtagacctgcaaggtcagcttgatgaaatcggccgcttccttcttcacctgctcttcggtgcagaagatatgcgcgtcgtcctgggtaaagccgcgtacgcgcatgatcccgtgcagcgcgccggacggctcgttgcggtggcaggcgccgaactcggcgaggcgcagcggcaggtcgcggtaggacttcaggccctggttgaagatctgcacgtggcacgggcagttcatcggcttgaccgcgtagtcgcgactttccgaggaggtggtgaacatgttctcggcgtagttcgaccagtggcccgaacgctcccagaggatgcggtcgaccacctgcggggtacgcacttcgacatagccatggtcgcgctggaccttgcgcatgtactgctcgagcacctggtagacgctccagccattcgggtgccagaacaccatgcccggcgcttcttcctgcaggtggaacaggtcgagctgcttgccgatgcggcgatggtcgcgcttctcggcctcttcgatgcgctggatgtaggccgccagttgcttcttgtcggcccaggcggtgccgtagatgcgttgcaactgctcgttcttcgagtcgccgcgccagtaggcgccggaaatcttggtcagttggaacgccttgaggaagcgggtgttcggcacatgcgggccgcggcacatgtccacgtactcctcatggaagtacaggcccatggccttctcgtccggcatgtcgtcgatcaggcgcagcttgtagtcttcgccacgggacttgaacagctcgatgacctcggcgcgcggggtcatcttcttgatcacgtcgtagtccttgtcgatcagctcgcgcatgcgctgctggatcgccgccatgtcctcgggggtgaaggggcgctcgaagaaaatgtcgtagtagaagccttcctcgatcaccgggccgatgaccatcttcgcggtcggatagagctgcttgaccgcatggccgaccaggtgggcgcaggagtggcggatgatctccagtccttcctcgtccttgggcgtgatgatctgcagggtcgcgtcgcgatcgatggtgtcgcaggcgtcgaccaggcggccgtcgaccttgccggcgagggtcgccttggccaggcccgcgccgatggattgggccacctcggccacggagaccgggtgatcgaaggaacgttgactgccgtcgggaagagtaatgatgggcat

SEQ ID NO: 701 - DNA, 1203 bp, Pseudomonas aeruginosa
tcagcggctctccctcgtacgcgcgtcttgctggcgcagatcgttgacgatccgcgaccccaggtcggaagcgctggcgctgccaccaccggcggaagcaccggcccccgtagcgggcgcggcgttacgaccatcgatcatcttgtccagcggcaggtagagcaggttgttctgcccctgctgaccggtcaccagcaccttgctggtctggctgaagacttcctgcatggtgtccaggtacagacgctcgcgcgtcacttccggagccttgcgatattccaccagcagcttggagaagcgatccgcctcgccctgggcgcgcgaaatcacctcgtcgcggtaaccgttggcttcttcgatgatgcgctgggcctggccacgtgcctccggcaccacgccgttggcataggcttcggcctggttcttctcgcgctgctcgtcctcgcgggcccggatcacgtcgtcgaacgcttcctgcacctcacgcggtgcctgggcgctctggatgttcacctgggtcacggtgataccggtcctgtaggtatccaggaagcgttgcaggcgctcgcgcacctcggtcgccatctgctcgcggccttcggtgaggatccggtccatggtggtggagccggcgacatgccgcagcgcgctctcggtcgcctgctgcaggctgacctcgggctggtcgacgttgagcacgaagtcctgcaggttgctgatcttgtactgcacggtcagcggcacttcgacgatgttctcgtcctcggtgagcatctgcccctgcttgctgtacgcacgctcgcgggtgacgttctcctggaagcgcttgtcgatcggcgggaagtagaagttcaggccgggaccgaccgtctcgtaatacttgccgaagcgcaggatgaccgcctgctcctgctcgtccaccacatagatggcgttgtacagccagagcacggcgaggatcgccaggccgatgccgaacaggcccaggccaccgcccttgccgccggaaccggagccggaaccgttgccactgcgtttttttccaccgaacagcccgttcaggctgtcctgaagcttgcggaaagcctcatccaggtcgggcggccccttgcggtcaccaccgccgccaccaccaccgcggcggcctccccacgggtctcgatcgttgttgttcgagttgtcacccggctcgttccaagccat

SEQ ID NO: 702 - DNA, 1428 bp, Pseudomonas aeruginosa
tcaggcgatctgtgcggcggcttcgtattcggccggcttggcggcactgacggtgcgccaggtgttgtaggccatcaggaacatgccgagcaggaagatgaaaccgccgagcatgcgcacgatgaagccggggtggccggcggccagcgcttcgacgaaggagtaggtcagggtgccgtcctcgttgaccgcgcgccacatcaggccctgggtgatgccgttgacccacatcgaggcgatgtaaagcacggtaccgatggtggccagccagaagtgcgcgttgatcaggcccaggctgtacatcttctcgcggccgaagaccttcgggatcaggtggtagagcgagccgatggaaaccatcgcgacccagccgagggcgccggcgtgtacgtggccgatggtccagtcggtgtagtgggagagggcgttgacggtcttgatcgccatcatcgggccttcgaaggtggacatgccgtagaacgccagggacaccaccaggaagcgcaggatcgggtcgctgcgcagcttatgccaggcgcccgagagggtcatcatgccgttgatcatgccgccccagctcggcgccaggaggatcagcgacatcaccatgcccagcgactgcgcccagtccggcagcgcggtgtagtgcaggtggtgcgggccggcccagatgtacaccgcgatcagcgcccagaagtggacgatggacaggcggtaggagtagaccggacgctcggcctgcttgggcacgaagtagtacatcatgccgaggaagccggcggtgaggaagaagcccacggcgttgtgcccgtaccaccactggaccatggcgtcggtggcgccggcgtacagcgagtaggacttggtgaaggtcaccggcagctcgaggttgttcaccacgtggagcatggcgacggtgaggatgaacccgccgaagaaccagttgcccacatagatgtgcttgaccttgcgcttgaccagggtgccgaagaacaccaccgcgtaggcgacccagaccaccgtgatcaggatgtcgatcggccattccagctcggcgtactccttggacgaggtgtagcccagcggcaggctgatggcggccagcaggatcaccagttgccagccccagaaggtgaaggaggcgagggtgtcggagaacagtcgcacctggcaggtgcgctgcaccgcgtagtagctggtggcgaacagtgcgcaaccgccgaaggcgaagatcaccgcgttggtgtgcagcgggcgcaggcggccgaagctcgtccacggcaagccgaagttcaggtcgggccataccagctgggcggcgatcaggacaccgacggtcatgccgacgatgccccagaccacggtcatgatggcgaattggcggaccaccttgtagttataggcggactctgggttagtggtgctcat

SEQ ID NO: 703 - DNA, 912 bp, Pseudomonas aeruginosa
ctacactgccgccgccgggcgcatataggaaataggcgcggtacgcgcgtcttcgaaggtcaccacttcccaagcatccttgtctgcgatcaacgtacgcagcagttggttgttcagggcatggccggacttgaagccacggaactcgccgataagactgttgccgagcagatacaggtcgccgatggcatccaggatcttgtgcttgacgaactcgtcctcgtaacgcaggccgtcttcgttgagcacgcggttctcgtcgaccacgatcgcgttctccacgctaccgccgagtgccaggttctgcgaacgcaggtactcgatgtcgcgcatgaacccgaaggtacgggcgcggctgacctccttgacgaaggaagtactggagaaatcgaccgaggcctgctgggtgcgaccacggaagaccggatgatcgaaatcgatctcgaagctgaccttgaagccgtcgaacggaacgaagacggcgcgcttgtcgccctcttccacgctgacttcgcgcttgatgcggatgaacttcttggcagcttcctgctcttgcaatccggcggactggatcaggaatacgaacggaccagcgctgccatccatgatcggcacttccgaagcggacagctcgacgtaggcgttgtcgatacccaggccggccatggccgagagcaggtgctccaccgtatccactttgacgtcacccttgaccagggtggtcgacatggtggtttcgccgacgttctcggcccgggccgggatttccacgaccggatccaggtcggtgcggcagaacacgataccggtgtccaccggcgccggtttcagggtcaggtaaaccttttcccccgagtgcagaccgacgccagtagcccggatgatgttcttcaaggtgcgttgtttgatcat

SEQ ID NO: 704 - DNA, 324 bp, Pseudomonas aeruginosa
atgaccttcgtcgtcaccgacaactgcatcaagtgcaaatacaccgactgcgtggaagtctgcccggtagactgcttctacgaaggacccaacttcctggtcatccatccggacgagtgcatcgactgcgccctgtgcgagcccgaatgtccggcccaggcgattttctccgaagacgaagtgccggagaacatgcaggaattcatcgagctgaacagcgagctggcggaagtctggccgaacatcaccgagaagaaggatgccctgcccgacgccgaggaatgggacggcgtcgccggcaagctccagcatctggagcgctga

SEQ ID NO: 705 - DNA, 777 bp, Pseudomonas aeruginosa
tcagcgggtgatgccgcgggttgcgctctggatggaatcacggaacaccgcgacctcggggaactgggcagcgctttcggccagctcggccagggcttcctcgacggtatgtccctggcgatagaccaccttgtaggcacgccgcagggcatggatggcctcgctgctgaagccgcgccgacgcatgccttcgaagttcatgctgcgggcttcggccgggttgccgaagaccgtcacgtaggccgggacgtccttgccgatggcgctgcccatgccggaaaagctgtgcgcgccgatccggcagtactggtgcaccagggtgtagccggacaggatcgcccagtcgtccacgtggacatgcccggccagcgccgtgttgttcaccaggatgcaatggttgccgatcacgctgtcatggccgatgtgcgcataggccatgatcaggttgtggtcgccaatggtggtttccgcgcgatcctggacggttccgcgatggatggtcacgccttcgcggatcacgttgtggtcaccgatcaccaggcgcgtcggctcgcccttgtatttcaggtcgggagtatcctcgccgacgctggaaaactggtagatgcggttgtgcttgccgatcttcgtggggcccttgagcaccacgtgcggaccgatcaccgtcccttcaccgatctccacttccgccccgacgatggaccacgggcccacctggacgtcagccgccagcctggcgctcggatcgatgatggcgcgaggatcgatcaaactcat

SEQ ID NO: 706 - DNA, 477 bp, Pseudomonas aeruginosa
tcacttggcctccaactgcgccagcaggctgaccatttccagggccgacagcgcggcttcggcgcccttgttgccggccttggtgccggagcgctcgatggcctgctcgatggagtcgacggtgaggacgccgaaggcgaccgggatgccgaactgcagggacacctgggccaggcccttggtgcactcgccagccacgtattcgaagtgcggggtgccgccacggatcaccgcgccgagggcgatgatggcgtcgaagccgccttgctgggcgaccttctgggtcaccagcgggatctcgaaggcacccggggcgcggatgatggtgatctcgctttcagccacgccgtggcggaccagggcgtcgacggcgccgctgaccaggctttccacgacgaagctgttgaagcggccgaccaccagggcgtagcggcctttgggggcaatgaaggtaccttcgatggtcttcagggtcat

SEQ ID NO: 707 - DNA, 369 bp, Pseudomonas aeruginosa
ttaacctacaatcatggaaaccaaccaacccagcagggaatcgagcccccacagcagcagcgccattaccagcactaccgcgaccacgatcagcgtggtctgagttgtttcttgacgactcggccatacgaccttgcgaatctcgacgcgcgcttccttagcaagactaaagaaggcctgccccttggccgtttgcagagccaggaaagcagcgatcaccgccagaacgagaataccgagaacgcgatacaggattggttgagccgaaaagtactgattgcccacaacggcaaccacaaccagaacggcaaccaagagccatttcaagagatcaaaacgtgattctttggcttctgccttggcattcat

SEQ ID NO: 708 - DNA, 522 bp, Pseudomonas aeruginosa
ttaatcgtcgagtcgctcttccagctggcgcacttcctgcgccagcttgtcgaggaactgcatgcgacggaccaggcgttcggcctcttcgcggcgctgcgcatcgtcccagcacgcggcgaactcacgctccagctcggcctgggcggccttgagccgacgcttgaaggtcgccacgccggccaggtccgcgctgtcctgcaactcctccagttcctcgcgcagctgcatctgctgcaggagaaactccggatcctgcaccgtagcctccaagggcaactcgtgaccactcagggtcaacaggtacagggcccggcgcggagcgctcttcagggtctggtaggcctcgttcagttgcgccgcgcgttccagggcgagacgctgctcgcgctcgggagcgtcggcgaaacggtcaggatggacgctgcgcaccaactcgcgatagcgctggccgagctcgtcgagatcgaccaggaaagccggttgcaggtcgaactgggcgaaatgacagggtttacccac

SEQ ID NO: 709 - DNA, 441 bp, Pseudomonas aeruginosa
tcatagtttgcgttccgcacagatgatttcagccgagcataccggcttgtcgtcgacggtagcgtggcagtcgaatttccagatgctgcgcttcacgctgatgaacttggcgtgcagttgcagttggtcgcccggcaggaccggctggcggaagcgcagcttgtccgaaccgacgaagtagtaaagggtgccgtcggcgggcttcacgtcgagcatcttgaaaccgaggataccggccgcctgggccatcgcctcgatgatcagcacgcccggcatgatcgggtgctcggggaaatgtccgttgaagaacggctcattgatactgacattcttgtaggcgcgaatgcgcttgccctcgatgtccagctctaccacccgatccaccagcaggaaaggatagcgatgaggcaggtattcgcgaatctcgttgatgtccatcat

SEQ ID NO: 710 - DNA, 594 bp, Pseudomonas aeruginosa
tcaggctttctcctggtccacgccgatggtgatgacgtcgtcagcatcgaacgtataaggcggaatcggcaggttcagcggcgctggctggcctttgtagacacgaccggcgaggtcgtagtgggagccgtggcaagggcagaagtagccgcccttccagtccgggccgaggtcggcgggggcgacttcgggacggaaggtcggcgagcagcccaggtgggtgcagatgccgacgatcaccgccagttccggcttgatcgagcgaagcttgggatcgacgtactccggctgctccgaggccttggagtccgggtcggccagttgtccttcgaggctcggcagggcgtccagcatctccttcgtgcggtgcacgatgaatacaggcttgccgcgccattcagcgatgatctgctgacctggatcgatcttgcccacgttcacctgcaccggcgcgccagcagccttggctttggcactggggaaccatgaccctacgaacgggaccgcagcacccaccgctcccgccgcgccaaccacagaggtggccgcgacgaggaagcgacgccggcctgcattcacgccgtcattactcat

SEQ ID NO: 711 - DNA, 2892 bp, Pseudomonas aeruginosa
tcactggcaggcttcgcagtcggggttatcgatgctgcacgcctgcggcaccggcgccggcttcggctcggcggccggggcggcttgcaggccgtcgttgccaccggccgacacggcgttgagcttgccggtgttgatggtggacttctcggtgctggtggcggccagggcacggaggtagtaggtggtcttcaggccgcggaaccaggccatgcggtaggtcacgtcgagcttcttgcccgaggcgccggcgatgtacaggttcagcgactgggcctggtcgatccacttctggcgacggctggcggcttcgacgatccagcgggtctcgacttcgaacgcggtggcgtagaggtccttgaggtcctgcgggatgcgctcgatctgctgcacggaaccgtcgtagtacttcaggtcgttgaccatgaccgggtcccacaggccgcgggccttgaggtcgcgcaccaggtaggggttgatcacggtgaactcgccggagaggttcgacttcacgtacaggttctggtaggtcggctcgatcgactgcgagacgccggtgatgttggcgatggtcgcggtcggcgcgatggccatgatgttcgagttgcggatgcctttctgtacgcgctcgcgcagcggcgcccagtcgagggtttccgacaggtcgacttcgatgtacttggcgccgcgctcttcgatcagcttcttctccgagtcgatcggcaggatgccttgcgaccacagcgagccctggaaggtttggtaggcgccgcgctcgtcggccaggtcgcaggaagcctggatcgcgtagtagctgatggcttccatggactggtcggcgaaggcgatggccgcgtccgaaccgtaggggatgtgctgcaggtacagggcgtcctggaagcccatgatgcccaggccgaccggacggtgcttgaagttggagttctgcgcctgcgggaccgagtagtagttgatgtcgatgacgttatcgagcatgcgtaccgcggtcttgacggtcttctccagcttggcggtgtccagcttgccgtcgacgatgtggttgaccaggttgatcgagcccaggttgcagacggcgatctcgtccttgttggtgttcagggtgatctcggtgcagaggttcgagctgtgcaccacgcccacgtgctgctgcgggctgcgcaggttgcacgggtccttgaaggtcagccatgggtggccggtctcgaacagcatggagagcatcttgcgccacaggtccttggcctggacgaccttgtgcagcttcagcttgccgtagctggccagggcctcgtagtactcgtagcgctcctcgaaggccttgccgtagaggtcgtgcaggtcggggacgtcggacggcgagaagagggtccaggagccgtcgtcgaagacgcgcttcatgaacaggtcggggatccagttggcggtgttcatgtcgtgggtacgacgacggtcgtcaccggtgttcttgcgcagctcgaggaattcctcgatgtccaggtgccaggtttccaggtaggcgcagaccgcgcccttgcgcttgccgccctggttgaccgcgaccgcggtgtcattgaccactttcaggaagggcacgacgccctgggacttgccgttggtgcccttgatgtaggagcccagcgcgcgcaccggggtccagtcgttgcccaggccgccggcgaatttcgacagcatggcgttgtcgtggatggcgccgtagatgcccgacaggtcgtccggcacggtggtcaggtagcagctggagagctgcggacgcagggtgccggcgttgaacagggtgggggtggaactcatgtagtcgaaggacgacagcaggttgtagaactcgatggcacgtgcctcgcggtccttctcctcgatggccaggcccatggccacgcgcatgaagaagatctgcggcagttcgaagcggatgccgtccttgtggatgaagtagcggtcgtacagggtctgcaggccgaggtaggtgaactgctggtcgcgctcgtgatcgatggccttgcccagtttctccaggtcgaattccttcagcttggcatcgaccagctcgaactcggcgcctttctcgatgtaggccggcagggccttggcgtacagctcggccatctcgtgatgggtggcgctctcggccacgccgaggaagcccagggcttcggcgcgcagggtgtccatcagcaggcgggcggtgacgtaggagtagttcggctcgcgctcgaccagggtgcgcgcggtcatcaccagggcggtgttgacgtccttctcggcgacgccgtcgtagaggttcttcagggtctcgcgctcgatcagcgcgccgtccacctcggccaggccttcgcaggcttcgctgatgatggtgttcaggcggcccatgtccagcggcgacaggctgccgtcggcgcgggtgatgcggatgctcgggtgcggctgggcgacgtcgctggcggcgccggcgttcttgcgctcggcggcgcgggcttcgcggtagatcacgtagtcgcgggcgaccttctgctcgccggcgcgcatcagggccagttcgacctggtcctggatctcttcgatgtggatggtgccgccggacggcatgcggcgcttgaaggtggcggtgacctgctcggtcaggcggcgcacggtgtcatggatacgcgacgaggcggcggcggtgccgccttccacggcgaggaacgccttggtgatggcgacggtgatcttgtcatcggtgtaggggactacggtgccgttgcgcttgatcacgcgtagctggcccggcgcggtggcggccagatcctgcgacgaatcggcggcctgcggcgcgctggcctgcgggttctcgcgtgtggtgtcggtatgcat

SEQ ID NO: 712 - DNA, 561 bp, Pseudomonas aeruginosa
tcaagcctgctcgtcgatggacggcggggtttccgccggcgccttgctgactaccaccatcgccggacgcagcaggcggccgttgagcaggtagcctttctggaacaccttgaggacactgcccggctcggccgaagcgctttcctgcatggccatcgcctggtgctgctcggggttgaaaggctcgccttccgggttcagcgcctccacctggtagcggcgcagggtgtcgtcgaacatcttcagggtcagttccatcccttcgcgcatcggcttgatcgcctcgtcgttgggatcggacatctccaggccgcgctcgagggtgtcgaccaccgccagcaggtcgccggcgaatttctccagcgcgaacttgtgcgccttctcgacatcctgctccgcacgccggcgtacgttctgcagatccgcgaccatgcgcagcgcctggtcctgggcggcagccagctgctcctccagttcctgcacgcgggcggtcaggtcctcggcggcgccggtgggctgctcgggggtctgttgatccagggtctgctgttcgtcagccat

SEQ ID NO: 713 - DNA, 1311 bp, Pseudomonas aeruginosa
tcaagccttgatgatgtgtgccgccggggagcggtacttgccacggctgtcaacaactagcttggcttcggccttgatcagctcatagtcaaacttgtcatggtcggtcgcaagcactacagcgtcgaacctagccaggttttcggcagtcagcggctcactgctcagttcgaagtggtgttcacgcatcttcgggaacaccggcacatgcggatcgctataggcgaccatcccacccttggcttcgatcagctccatgatttccacggatggcgactcgcgcatgtcgtcgacattcttcttataagcgatacccaataccagtacacgactgcccttgagggccctgcctgcctcgttcaggccatccatgagtttgcccagtacgtattccggcatggcctggttgacctcaccagacagttcgatgaagcgggtatgcagtccgtattcgcgagccttccaagtcaggtagaagggatcgatcgggatacagtgcccgcccagtcccggccctgggtagtaaggagtgaaaccgaacggcttggtcgccgcagcatcaaccacttcaaagatgtcgatacccatgcgatcagcaacgatcttcatttcgttgaccagaccgatattgaccgcgcgatgaatgttctccaacagcttggtcatctcggcggccttggtggaactgaccggcacgacccggtcgatggcctgttcatacagggcaatgccgacttccagacactgaggagtgtgaccaccgatcactttcggaatggtacgagtctcgaagttcgggttgcccggatcttcacgctccggagaatagaccaggtagatgtcccggccaaccacgaggccaccctcctgcacgcgtggcaacaactcttcctcggtagttcccggataggtggtactttccagcgaaaccacctgccctacgcgcagatacggttttagtgcgtcggtggtattgatgacaaagctcatatccggctcgcgatacttgttcagcggcgtcggcacacaaaggatcagggcatcacattcactgacacggctgaaatcggtcgtagcctcgaaaccgcttgcacgggccttagcaattttggcttgcggaatatgttcgatatagcactgcccggcattaagcttgtcaaccttgacatcatcgatatcgatacccaagacatcgaaaccaatggcgttgtatcgcagcatcagtggtaaaccgacataacccagacccacgataccaatcaaggcctgtcggcttttgaacttctctaccactgtgttaacatctatcat

SEQ ID NO: 714 - DNA, 249 bp, Pseudomonas aeruginosa
tcaagcgttgcccggctcggccggctggtcaccgctcggcagacgcaccggacggctcggtaccacggtggagatcgcgtgcttgtaaaccatctggctgacggtgttcttcagcaggatgacaaactggtcgaaagactcgatctggccttgcagcttgatgccgttgaccagatagatggaaaccgggacgcgttctttccgcagggtattgaggtaagggtcttgtagcgaatgcccttttgacat

SEQ ID NO: 715 - DNA, 846 bp, Pseudomonas aeruginosa
ctaggcagtctcgattgcaggaaagctcttgatcagctcgtccagttgcttgagctgggacaggaaggcttcgagtttgttcaggcgcagcgcgcacggaccgtcgcacttggcgtgctcggggtccggatgggcctcgaggaacagcccggcgagcttctggctgagcccggccttggccaggtcggtgacctgggcgcgccggccgccggcggagtccgcgcgaccgccaggcatctgcagggcgtgggtgacgtcgaagaataccgggtactcgaactgcttcatgatgccgaagccgagcatgtcgaccaccaggttgttgtaaccgaaggaggagccgcgctcgcagaggatcaggcggtcgttaccggcttcctcgcacttggtcaggatgtgcttcatctcctggggcgcgaggaactgggccttcttgatattgatcaccgcgttggtcctggccatcgccaccaccaggtcggtctgtcgcgagaggaaggccggcagctggatgatgtcgcagacctcggccaccggctgggcctggaacggctcgtggacatcggtgatgaccggtaccttgaaggtcttcttgatctcttcgaagatcttcattccctcttccaggcccggaccacggaacgagtggatcgaggaacggttggccttgtcgaagctggccttgaacacataggggataccgagtttctcggtaacccgtacgtattcttcgcagacctgcatggccaggtcgcgcgactccagcacgttcatgccgccgaacagcacgaacggcaggtcgttgccgatctggatatcgccgacgcgaacgatcttctgtgccat

SEQ ID NO: 716 - DNA, 300 bp, Pseudomonas aeruginosa
ttactcagcgctggtggcgaaatcgagatcttggcccggctggagagcgatgtacgcttttttccagtcgttacgcttgcccagaccgcgagcggtgcgcttggtcttacccttgacgttcagggtagtgacgcgctgtaccttcacgctgaacaggctttctacggccttcttgatttccagcttggttgcatcggtggcaaccttgaaaacgaattggctcttgccgtccgcgagacccgtggctttctcggagatgtgcggaccaagcagcactttgaatacgcgttcctggttcat

SEQ ID NO: 717 - DNA, 315 bp, Pseudomonas aeruginosa
tcaagcctgaaccggtttctgggtcgacttgaagacacgaattttcttaccgtcttctaccttgaagccaacgcggtcagccttgctggtttcagtattgaagatggcgacgttggagacgtgcagaggcgcctccttctcgacgataccgccctgttggccgagcatcggattgggcttggtgtggcgcttgatcaggttcaccccgccgacgaccagacggtcgtcagcgagaaccttcagcaccttgccacgcttgcccttgtccttgccggcaatgacgattacttcgtcgtcacgacgaatcttttgcat

SEQ ID NO: 718 - DNA, 1482 bp, Pseudomonas aeruginosa
ttactcgaaccaatgggcccgggcggccatgatcaacttgccggcacgctcttcgtccatgccgtcgatgtcgagcagatcgtcgatcgattgctcggccagatcttcacgggtggttacgccacgcagcgccaggtccagggccagctccttgctcatgccatcgaggctgagcaggtcttctgccggttgtgcgtcggcgagcttctcttcggtcgcaatggccttggtcagcaggcgatccttggcacgggagcgcagctcgttgacgatgtcttcgtcgaagccatcgatgctgagcatctcttccatcggtacgtaggcgatttcctcaagagtcgtgaagccctcttccaccagtacctgggccagttcctcgtcgacatccagctcgtcgacgaagcgctgcaggatatccccggtctcggcctgttgcttggcctggatatccgcctcggtcatcacattcagggtccagccggtcaactggctggccagacggacgttctggccactgcggccgatagcctgcgccagattgtcctcggcgacggcgatatccatggtatgggtatcctcgtcgacgatgatcgccgccacctcggccggagccatggcgttgatcacgaattgcgccgggttgtcgtcccacaggacgatgtccacccgctctccaccgatctcgccggataccgcctggacgcgcgaaccgcgcataccgatgcaggcgccctgcgggtcgatgcgcttgtccttggaacgaacggcgatcttggcgcgcgagcccgggtcacgggcggcggccatcacgtcgatcaactgctcggcgatttccggtacttcgatgcggaacagctcgatcagcatttccggcgcggtacgcgacaggaccagctgaggaccgcggttctcggtacggatctccttcagcagggcacgcacgcgggtgccaacgcggaaggtctcgcgtggaatgatctggtcgcgggccagcagcgcctcggcgttgttgccgagatcgacgatgacgttgtcgcgggtgaccttcttcacggtaccggaaatgatctcgccgaccttctcgcggtaggcatcgaccacctgggcgcgctcggcctcgcggaccttctgcacgatgacctgcttggcagtctgcgcagcgatgcggccgaactcgatggattcgatcttttcttcgatgacctcgccgaccttcgcgcccggcttctgctcctggacgtcctcgacggtgatctcggtggcggggtcctggtagtcctcgtcggcgacgacgtgccaacgacggaaagtctcgtagctgccgttatgacgattgatctcgacgcgcaggtcgacctcgtcctcgaaacgtttcttggtggcggtcgccagagccagctccagcgcctcgaaaatcacgccggccggtacgcccttttcgttggataccgactcaacaaccagcagtacttctttgctcat

SEQ ID NO: 719 - DNA, 1290 bp, Pseudomonas aeruginosa
tcagccgcggaattccgcgcgaccacggtacggcgccttggcgcccagttgctcttcgatgcgcagcaactggttgtacttggacacgcggtcggagcggcacagcgaaccggtcttgatctgaccggcggcggtacccacggccaggtcggcgatggtcgagtcctcggtttcgccggagcggtgcgagatcaccgcggtatagccggcggccttggccatctggatggcctccagggtctcggtgagcgaaccgatctggttgaacttgatcaggatcgaattgccgatgcccttctcgatgccttccttgaggatcttggtgttggtcacgaacaggtcgtcgccgaccagttggaccttggcgccgatcttgtcggtcaggcctttccagccggcccagtcggactcgtccatgccgtcctcgatggagatgatcgggtagcgctgggtcaggccggccaggtagtcggcgaaaccggcggcgtcgaataccttgccttcgccttccaggtcgtacttgccgtccttgaagaactcgctggaggcgcagtccagggccagggtcacgtcgtcgcccagcttgtagccggccttctcgacggcctcggcgatggcggccagggcgtcttcgttggacgacaggttcggcgcgaagccgccttcgtcaccgacggcggtgttcaggccacgggccttcagcacggccttgaggtgatggaagatctcggcgcccatgcgcagcgcctcggcgaagttcttcgcgccgaccggctggaccatgaattcctggatatcgacgttgttgtccgcatgctcgccgccgttgatgatgttcatcatcggcaccggcatggagtactggccgggagtgccgttgaggtcggcgatgtgcgcgtacagcggtacgcccttggcctgtgcggcggccttggcggcagccagggacaccgcgaggatcgcgttggcgcccagcttggccttgttctcggtgccgtccagctcgatcatcgcgtggtcgagggctttctggtcggccgcgtccttgcccagcagcaggtcgcggatcgggccgttgatgttggccacggctttcagcacgcccttgcccaggtaacggctcttgtcgccatcgcgcagctcgagggcctcgcgggaaccggtggaagcaccggaaggcgcgcaggcgctgccgacgatgccgttgtccaggatcacgtccgcttcaacggtagggttgccgcgggagtccaggacctcacggcccttgatgtcgacgatctttgccat

SEQ ID NO: 720 - DNA, 480 bp, Pseudomonas aeruginosa
gtgatcgattccgatggttttcgcccgaatgtcggcatcattctcgccaacgaggcggggcaggtgctgtgggcgcggcgtatcaatcaggaagcctggcagttcccgcagggaggcatcaatgatcgcgaaacgccggaagaggcgctgtatcgcgagttgaacgaagaagtcgggctggaggccggggacgtgcgcatcctggcctgcacccgcggctggctgcgctaccgtttgccgcagcgcctggtgcggacccacagccagccgctgtgcatcggccagaagcagaaatggttcctgctgcggctgatgtccgacgaggcgcgcgtgcgcatggatatcaccagcaagcccgagttcgacggctggcgctgggtgagttactggtaccccctgggacaggtggtgaccttcaagcgcgaggtctaccgccgcgccctgaaggaactggccccgcgccttctggcgcgggactga

SEQ ID NO: 721 - DNA, 841 bp, Pseudomonas aeruginosa
gctcatctctccatgggttgggcacgaatggccggcagtataacggcgccgcgaaagcaccgcagcattgccttggacgttcgccacggggcgcggttcctcgcctgtggcaggtggcgcagggcacgcatgcccggcgtttggcagatacggcgcggcggattgtcccagggggctttcgccggcgggcacttcgtgaccgggaatgggaaaaaagtctaaggagcggggtattttttgattttcaccgttataatcgccccccgattataaggacgcctcctgatcgggttccggcccccgcgccatccccccacagagagccgccagtagagcgctgccccatgaggcagacgccctgaaacgcctgtagcgagtttttcggcaaggaatgccgcatgaccccgcacgattctgcgaaggcatgcccgcgacagacgagcccttccggcccatgtctccaaaagagcgtggatcgaaggtatttcactacttcacgagagtgtggcgagcaatgaagagttttgcgtcggtaagtgcgccattagcgcttgaaacagccccccgcagacgcgaccgcagcggatacctcatgaccagagcctgacggcccgttccgtcgcgaatgtgcttgcacgaccggatgcccgcatgggccagccaggctgccagatcgccagccccgcgcccggcatccataggcgatgacgcccggcgtcccgccgttgttgcgaagaatcggacatgacggctccctccgccgctgcctgccggcccgtaccggcctcggccccgccccgtctgtcgtcaatttggtgctgaagattttggagaagcgtta

SEQ ID NO: 722 - DNA, 471 bp, Pseudomonas aeruginosa
ttagatctcggctgccagtttggaaaccagctgctcgtgcgcgtttgcgtcgatcgaagcacccaggatcttctctgcgccggtgacggccagggcacccacttgggcacgcagggcgtccttgacgctgttcagttcctgttcgatttccgcttgggcctgggccttcaggcgttcgccttcggtacgggcctggtcgcgggcttcatcgacgatctggttagcgcgtttcttcgcctgttcgacgatttcggctgcctgagccttggcttcgcgcagttgctggcccgctttctcatgagccagctccagatcacgagccgcgcggttggcagcgtccaggccgtcagcgatcttcttctgacgctcttgcagagccgcgatgaccggaggccacacgaacttcatgcagaacagcacaaagatgaagaacgcaacggactggccaatcagggttgcattaatgttcac

SEQ ID NO: 723 - DNA, 939 bp, Pseudomonas aeruginosa
tcaggccagggcggcgcgcgtggcggcgaacgcctcgacgccatccaggccatgggtattgatgcccttcgcgcagcgcctgttgaggcctgccaggaccttgcccggcccgcactcgaccagctcggtgacgcccttttccgccagcagctggatgctctccacccagcgaaccgggctgtacagctgtgccagcaggtcgcggcgcagcgtatcgagatcagccggcacggcggcgctgacgttctgcaccagcgaaatcttcggcgcctgccactgcaggctttcgaccgaggcggcgaactgctcggcggccggacgcatcagttcgcaatgcgacggcacgctgactggcaacgccaccgcgcgcttggcgccgcgtgccttgcatgcctcgatggcacgctcaacggcagccgcggcaccggcgatcactacctgccccggcgcgttgaagttgaccgcgctgaccacctcgccctgggccgcctcggcacaggccgccaatacatcggcgtcttccaggccaaggatcgcggccatgccgccctgccccgccggaaccgcctgctgcatcagttggcccctacgctcgaccagcttgaccgcatcggcgaacgccaggctttcggccgcgaccagcgcggaatattcgcccaggctgtgcccggcgacgaacgccgggcgcgcaccgccctcggccagccagaggcgccagagcgcgatcgaaaccgtaaggatggccggctgggtcttgtcggtctggttcaggcgctcttcaggaccattctggaccagcgcccaaaggtcgtaaccgagcgcctcggaggcctcggcgaaggtatcgcgcaccagcgcctgctgggcgcccagctcggccagcatgccgagggattgcgaaccctggccagggaagacgaatgcgagggatgcagacat

SEQ ID NO: 724 - DNA, 429 bp, Pseudomonas aeruginosa
gtgacccgggtcgatttctacgtgatccccagcgccgatccgtcggcgcgcctgcaggtcgcctgccgcctggccgagaaggcctggcggcagggcatgcaggtctacctgcattgcgccgacgaggcgcagcgcagcgagttggacggccgcctgtggagcttccgcggcgaggccttcattcctcacagcctggccgaggaagacgccgaggcgcccgtcgccctgggcctgggcgagcccccggggaaccatcgcgacctgctgatcaacctgaccctcgaggcccccggcttcgtcccgaacttttcgcgggtggccgaactggtggtcgaggagccggcgatccgccaggcggcacgggataaattccgcttctaccgggagcagggctatcctctacaggaccatcgcctgccgcgtatctga

SEQ ID NO: 725 - DNA, 1455 bp, Pseudomonas aeruginosa
atgctgcatcaattgaccctcgccgagatcgcccgcgccctcgccgacaagcaattttccgccgaagagctgacccgcaccctgctcggtcgcatccggcagctggatccccagctcaacagtttcatcagcatcaccgacgacctggccatcgcccaggccaaggcagccgacgaacggcgcgccaacggcgagaacggcgccctgctcggcgcgccgatcgcccacaaggacctgttctgcacccagggcgtacgcaccagctgcggttcgaagatgctcgacaacttcgtctcgccctacgacgccaccgtggtcgagaagctcaccgccgccggcgccgttaccctcggcaagctgaacatggatgaattcgccatgggctcgtcgaaccagtccagccactacggcgcggtgaagaacccctggagcctcgaccgcgtgccgggcggctcctccggcggttccgccgcggcagtcgccgcgcgcctgctgccggccgccaccggcaccgataccggcggctcgatccgccaaccggcggcgctgaccaacctcaccgggatcaagccaacctacggccgggtttcccgctggggcatgatcgcctacgcttccagcctcgaccagggcggcccgctggcgcgcaccgccgaggactgcgcgctgatgctgggggtgatggccggattcgatccgaaggactcgaccagcgtcgaacagccggtggacgactacctggccgccctgcagaagccgctgagcggcctgcgcatcggcctgccgcgggaatacttcggcgccggcctcgacagccgcatcgccgacgcggtgctggccgtggtcgaggagctgaagacgctcggcgccacggtgaaggacatttccctgccgaacatgcagcacgccatcccggcctactacgtaatcgcgccggccgaggcgtcctccaacctgtcgcgcttcgacggcgtgcgctatggctatcgttgcgacgccccgcagaacctggaagacctgtacaagcgctcgcgcgcggaaggcttcggcagcgaagtgaagaaccgcatcatggtcggcacctacgcactctcggccggctactacgatgcctattacctgcaggctcagaagattcgccggctgatcaagaacgacttcgtcagcgcctttgccgaagtggacgtgatcctcggcccgaccacgccgaacccggcctggaagatcggcgagaagaacgacgacccggtttcccagtacctggaagacatctacaccatcaccgccaacctcgccggcctgccggggctgtccatgcccgccggcttcgtcgacggcctgccggtgggtgtccagttgctcgcgccctacttccaggaaggccgcctgctcaacgtcgcgcaccagtaccagcaggtcagcgactggcacacccgcaccccggccggcttctaa

SEQ ID NO: 726 - DNA, 288 bp, Pseudomonas aeruginosa
tcagcccgccatgtagctcggcagaccgcgctcctgcagacgacgcagggtgccgaccacatccaccggcaggctccccgcctccagggccaggtcacggcgcacggcgttgatgaaccagtacatgcgcttctcgtcggccaactgggcggcggacaccacgcgacgagtcacgatctcttcgccgttgcgcagggtcagcagggcgccgccgtccggacgcatctgggtggatacggcaaaggtggcctggaaggcatcgaacagcatcttgatggacttttccat

SEQ ID NO: 727 - DNA, 76 bp, Pseudomonas aeruginosa
gtgggcgtagctcagttggtagagcacaggattgtggctcctggtgtcgtgggttcgattcccatcgtccacccca

SEQ ID NO: 728 - DNA, 2226 bp, Pseudomonas aeruginosa
atgtccatccgctcgaagatcacctacaccttcaccgacgaagcacccgcgctcgccacctactcgctcctccccatcgtcaaggcctttgccgcttccgccggcatcgacgtcgagaccagcgacatctctcttgcaggacgcatcctggccaacttcgccgaccgcctcgaagccgaccagcgtatcgaagacgacctcgcccgcctggcggtcctggccacctcgcccgacgccaatatcatcaagctgcccaacatcagcgcctcggtgccccagctgaaaggcgcgatcgccgagctgcagggcctgggctacaaggttcccgacttcccggaagacccgcagaccgacgaagagaaagaggttcgcgcacgctacgcgaagatcctcggcagcgccgtgaacccggtcctgcgcgaaggcaattccgaccgtcgcgcgcctgccgcagtgaaggcctacgcccgcaagcacccgcactccatgggcaagtggagcatggcctcgcgctcccacgccgactacatgcgcggcggcgacttcttctccagcgaacagtccatcaccatggccaaggccggtgacgtgcgcatcgaattcgtcggcaaggacggcaaggtcgaggtcaagaagcaactgagcctgcaggaaggcgaagtgctcgacagcatgttcatgagctgcggcaagctgcgcgacttcttcgagaagaccctgcaggactgcaaggaaaccggcgtcatgtggtccctgcacgtcaaggcgaccatgatgaagatttcccacccgatcgtcttcggacatgcggtgagcgtctactacaaggacgtcttcgacaagtggggccaactcttcgaagagctcggcgtgaacccgaacaacggtatctccagcgtctacgacaagatcaagtcgctgcccgcctcccagcaggaagagatcctccacgacatccacgaggtgtacagccaccgcccggaaatggcgatggtcgactccgtgaaaggcatcaccaacctgcacattccgagcgacgtcatcgtcgacgcctcgatgccggcgatgatccgcaactccggccagatgtggggcaaggacggcaagcagaaagacaccaaggcggtaatgccggaaagcacctacgcccgcatctaccaggagatgatcaacttctgcaagaccaacggcgccttcgacccgaccaccatgggcagcgtgccgaacgtcggcctgatggcgcagaaggccgaggaatacggctcccacgacaagaccttcgaaatgaccgccgacggcaccatgcgcgtggtcctggccgacggcagcgtgctgatgcagcacaaggtggagaccggcgacatctggcgcgcctgccagaccaaggacgcgccgatccgcgactgggtcaagctggccgtcacccgcgcacgccagtccgataccccggcgatcttctggctggacccggagcgcgcccacgaccgcgaactgcgcaagaaggtcgagctgtacctcaaggaccacgacctgaccggtctcgacatcagcatcatgggctacaacgaggccattcgcgtcagcatggaacgcctgatccgcggcaaggacaccatctcggtgaccggcaacgtcctgcgcgactacctgaccgacctgttcccgatcatggaactgggcacctcggccaagatgctctccatcgttccgctgatggcgggcggcggcatgtacgaaaccggcgccggcggctcggcacccaagcacgtccagcaactggtggaagagaactacctgcgctgggactccctgggcgagttcctggccctggccgtgtccctggaggaaaccgggatcaagaccggcaacgccaaggccaagctgctcggcaaggcgctggacgaagccaccggcaagctgctggacaacaacaagtcgccgtcgcgcaaggtcggcgacatcgacaaccgcggcagccacttctacctggcgatgtactgggcccaggccctggccgcccagaacgaagacgctgagctgaaagcgcacttcgcaccgctggccaaggccctgaccgagcaggaagcgaccatcgtcgccgaactcaatgcggtccagggcaagccggccgagatcggcggctactatcgctccaacccggagctgaccagcaaggtgatgcgccccagcgccaccttcaacgcggcgatcgacagcctggcctga

SEQ ID NO: 729 - DNA, 222 bp, Pseudomonas aeruginosa
atgacctcccgtctgctgcccgccctgttgctctcgtccgcattcgccgtcctggccggctgctccaccccgaccatcgtcaccctcaacgatggccgcgagatccaggcggtggataccccgcgctatgatcgtagttccggcttctacgaactggagcaactggacggcaagcgcacccgcgtcaacaaggaccaggtgcgcagcatcaaggacatgtaa

SEQ ID NO: 730 - DNA, 333 bp, Pseudomonas aeruginosa
ttacttgtccgcaaccttgaccgtgatatggcaagaccgcttcacgatgcgatcagcacggcctttggcacgcggcatgatgcgcttgagcgaacgaccttcgttgacgaagacggtggagaccttcaggtcatccacatcggcgccttcgttgtgctcagcgttggcaacggccgactccagcactttcttcatgatctcggcggctttcttactgctgaaagccaggaggttgagcgcttcgcccaccttcttcccgcggatctggtcggcgaccaagcgggctttctgggcggagatacgagcgcccgacagcttagcggctacttccat

SEQ ID NO: 731 - DNA, 390 bp, Pseudomonas aeruginosa
tcagtcctcggtctcgtcgccgtggcggcggccgtcttcggccaccgcacgctcgatcagcgccgacagctcggcgccgcggcggatgctttcgtcgtagtggaaatgcagttgcggcacgctgcgcagcttcatcgacttgcccagcagcatgcgcaggtagccggcggcgtcgttgaggatttccatgttcagggcgatcttgccggcatcgtcctggcccatgacggtgatgaacaccttggcgtgcgccacgtcgcggctgacctcgacaccggtgatggtgaccaggcccaggcgcgggtccttgatctcgcgctggatcagttgagccagttcgcgttgcatctgatcgccgatacgctgggtacggctgtagtcttttgccat

SEQ ID NO: 732 - DNA, 327 bp, Pseudomonas aeruginosa
atgatgaaaggtggcatggccggcctgatgaagcaggcgcagcagatgcaggaaaagatgcagaagatgcaggaagaactggccaacgccgaagtgaccgggcaatccggcgccggtctggtcagtgtggtgatgaccgggcgccacgacgtcaagcgcgtcagcctggacgacagcctgatgcaggaagacaaggaaatcctcgaagacctgatcgcggccgcggtcaacgatgcggtgcgcaagatcgagcagaacaaccaggaaaagatgtccggcttcacctcgggcatgcaactgccgcccggcttcaagatgcccttctga

SEQ ID NO: 733 - DNA, 321 bp, Pseudomonas aeruginosa
tcagcgcaactggcgttgtgcggtgatttccggcaggtcctggcggcgcagatagaccagtagcggctcgccgatgttcagtcgttcgttgatgttctgttccagcaggatctgcaactgctcgcggcccaggcgcatgacgtcgtcgcgtaccgaactccagacgaactcgctggtgggcgtgatgctgtcgtcggctacgtccatgccgaaggagtcttcgctgaaacgcacgatgtagcggccggtcttgcggttgaaaccgacgaaccccttgagggcatcggcggcctggcagatgtcggtggatgtgatgctcat

SEQ ID NO: 734 - DNA, 606 bp, Pseudomonas aeruginosa
tcagtgcagaccctggatgtagctggaaatcgcggcgatgtccttgttcgacagcttggcggcgatggactgcatgatcttggtgtcgccgtcgttggtgcgggtgccttcgcggaagtcggtcagctgcttggccacgtaggtcgcgtgctggccgcccaggtgcgggaaaccggcggttgcgatgccgacgccgctcggggaatggcaaccggtgcaggccggcatgccttcggcgatcttgccgccgcggaacagcgcttcgccctgggccaccaggttcggatcggccatgccgacgctcatcttctggctggcgaagtaggcggcgatgtcggccaggtcctggtcgctgaggttggtcagcaggccggtcatttccagcacggtacgcttgccgtccttgatgtcatgcatctgcttgagcaggtaacgctcgccctggccggccagtttcgggaagttcggcgccgggctgttgccatccgcaccgtgacaggcgccgcataccgcggctttcgcctggcccgcggcggcatcgccagcggcatgggcaaggccggtcagacccagggtcaacagcagactcacgagaagtttgttcat

SEQ ID NO: 735 - DNA, 1386 bp, Pseudomonas aeruginosa
tcaacgcgggaaggccggcgggttgaccccagccatgtcttccatcacgcgcactacctggcagctgtagccgaactcgttgtcgtaccacacgtacaggacgacacggttgtcgttgcagatggtcgcctcggcgtccaccacgccggcatggcgcgaaccgacgaagtcggtggaaaccacttcctgggagctgacgaagtcgatctgcttctgcaggtccgagtgcatggccatctggcgcaggtactcgttgatctcttcgcgggtggtggccttttccaggttcaggttgaggatcgccatggacacgttcggcgtcggcacgcggatcgcattgccggtcagcttgcctttcagcaccggcagggccttggccgcggcggtggcggcaccggtctcggtgatcaccatgttcagcggcgcgctgcggccacgacgactgcccttgtggaagttgtcgatcaggttctggtcgttggtgtacgagtggacggtctcgacgtgaccgttgacgatgccgtactggtcgttgacggccttcagcaccggcacgatggcgttggtggtgcaggaggcggccgagatgatcttgtcgtcggcgccgatgtcggtgtggttgataccgtgcacgatgttcttcagcgcacccttgcccggagcggtaaggaccacgcgatcgatccccgggcacttcaggtgctggccgaggccttcggcgtcgcgccacttgccggtgttgtcgaccagcagggcgttcttgatgccgtactgggtgtagtcgatcgacgccgggtcgttggagtagatcacctggatcaggttgccgttggcggtcagcgtgttgttttcttcgtcgatggtgatggtgccgtcgaacggaccgtgcaccgagtcccgacgcagcaggctggcccgcttgaccaggtcgttctcggcgcccttgcgcacgacgatcgcgcgcaggcgcaggccgtcgccgccgccggtcttctcgatcaggatgcgcgccagcaggcggccgatgcggccgaagccgtagagcacgacgtcggtgccttcgcgggcatcgccgttctgcttgccgaccacctcggccagctcggccttgacgaagtcctcgatgctgcggccgttaccttctgccttgaacttggcgaccatcttgcccagatcgacggaagcggcgcccagcttgagctcgctcatcgccttgaggatcgggaacgtctcgtgaaccgacagctcggcgtcatcagccatgcgatgacgggcgaaacgatgcgccttcatgatcgcgatcaccgagcggttgatcagaccacggccatggatcgaggtcaccacattgttattgcggtagagctggccaatcagcgggatcat

SEQ ID NO: 736 - DNA, 711 bp, Pseudomonas aeruginosa
atggaaaaacgcgaagaactctaccgcggcaaagccaagtcggtttaccagaccgacgatgccgatcgtctcatcctgctgttccgcaacgacacctccgccttcgacggcaagcgcatcgaacagctcgatcgcaagggcgcggtgaacaacaagttcaacgccttcatcatgcagaagctggaagctgccggcattccgacccagttcgacaagctgctgtcggataccgagtgcctggtgaagaagctcgacatgatcccggtcgagtgcgtggtgcgcaatttcgccgccggcagcctggtgcgtcgcctcggcgtggaagagggcatcgccctgactcctcccaccttcgagttgttcctgaagaacgacgccctgggcgatccgttcatcaacgaatcccacgtccaggccttcggctgggccactcccgagcagctggcgcagatgaagacctattccttcaaggtcaatgaagtgctgaacaagctgttcgacgatgccggtctgctgctggtggacttcaagctggagttcggcctgttccatggccagatcgtcctcggcgacgagttcagcccggacggctgccgtctgtgggacaaggaaacccgcaagaagatggacaaggaccgcttccgccagggcctcggcgatgtgatcgaagcctacgaagaggtagccaagcgcctgggcgtgccgctttaa

SEQ ID NO: 737 - DNA, 2622 bp, Pseudomonas aeruginosa
atgcacgagcaatatcagccactcgagatcgaaacccaggcccagaactactggaaagaacaccagtccttcctcgtcagggagctacccgacaaggagaagttctactgcctgtcgatgttcccgtatccgagcggcaagctgcacatgggccacgtgcgcaactacaccatcggcgacgtgatcagccgctaccaccgcatgcagggccgcaacgtgctgcagccgatgggctgggacgcgttcggcatgccggcggaaaacgccgcgatgaagaacaacgtcgccccggcggcctggacctacgacaacatcgcctacatgaagtcgcagctggacagcctcggcctggcgatcgactggagccgcgaggtcaccacctgcaagccggactactaccgctgggagcagtggctgttcacccgcctgttcgaaaaaggggtgatctaccgcaagaacggcacggtcaattgggatccggtcgaccagaccgtactcgccaacgagcaggtgatcgacgggcgcggctggcgctccggcgcgctgatcgagaagcgcgagatcccgatgtactacttcaagatcaccgcctacgccgaggaactgctggagagcctcgacaacctgcccggctggccggagcaggtgaagaccatgcagcgcaactggatcggcaagtcgcgcgggatggagatcggcttcccctacgaccaggcctccatcggccacgccggccaactgaaggtgttcaccacccgtccggacaccctgatgggcgccacctacgtcgccgtcgccgccgaacacccgctggccacccaggcagcgcagaacgacccgcagttgcaggcgttcatcgacgaatgcaagcgcggcggcgtcgccgaggccgacatcgccacccaggagaagaaaggcatggccacttccctgttcgtcgaacacccgctgaccggcgacaagctgccggtatgggtcgccaactacgtgctgatgaactacggcgaaggcgcggtgatggcggtgcccggccatgacgagcgcgacttcgagttcgccaacaagtacggcctgccgatccgccaggtgatcgccaaggtcgagggcgacaacgacttcgagtccagcgtctggaaggagtggtacggcgccaaggacgagtccgtgctcaccgtcaactccggcaagtacgacaacctcggctaccaggccgccttcgacgccatcggcgccgacctcgaggccaagggcctgggccaggcgcgcacccagttccgcctgcgcgactggggcatcagccgccagcgctactggggctgcccgatcccgatcatccactgcgaggcttgcggcgacgtcccggtgccggccgaccagttgccggtggtgctgccggaagacgtggtaccggacggctccggttcgccgctggcgaagatgccggaattctacgaatgcaactgcccgaaatgcggccagccggccaagcgcgaaaccgacaccatggacaccttcgtcgagtcgtcctggtatttcgcccgctacgcctgcccgcagttcgaaggcggcatgctggacaggaaggcggccgactactggctgccggtcgaccagtacatcggcggcatcgagcacgccatcctgcacctgctctatgcgcgcttcttccacaagctgatgcgcgacgaaggcctggtcggcagcgacgaaccgttcaagaacctgctgacccagggcatggtggtcgccgatacctactaccggaccaccgccaacggcggcaaggactggttcaacccggccgacgtcgaggtcgagcgtgacgccaaggccaaggtcgtcggcgcgcgcctgaagagcgacggccagccggtcgagatcggcggcaccgagaagatgtcgaagtcgaagaacaacggtgtcgacccgcaatcgatgatcgaccagtacggtgccgatacctgccgcctgttcatgatgttcgcctcgccgccggacatgagcctggagtggtcggacgccggcgtcgagggcgccaaccgcttcctccgccgcgtctggcgcctggctcacgcccacgtcagcgccggcctccccggcgcgctggacgtcgccgccctgagcgacgcgcagaagcaggtccgccgcgccatccacctggcgatcaggcaggccagccaggatgtcggccagcaccacaagttcaacaccgccatcgccgcggtgatgaccctgatgaacgtgctggagaaggcgccgaaccaggacgcccaggaccgcgccctgatccaggaaggcttggaaaccgtggtcctgctgctggcgcccatcactccgcacatctgccacgtgctctggggccagctcggccatgccgaagcggtgatcgatgcgcgctggccgagcgtcgacgagagcgcactggtgcaggacaccctgcaactggtggtgcaggtcaacggcaagctgcgcggacacatcgacgtggccgccagcgccagccgcgaggatgtcgaggccgccgcgcgcgccaacgagaacgtgctgcgtttcaccgaaggcctgagcatccgcaaggtcatcgtggtaccgggcaaactggtcaacatcgtcgccaactga

SEQ ID NO: 738 - DNA, 1914 bp, Pseudomonas aeruginosa
ttacttgttgtccttgacctcttcgaactcggcgtccaccacgtcgtcagcggctttcgcctgctcgccctggggagcgtcttcgccctgctgggcctgttcggcgtacatcttctgcgccagcggggtggaagcctgggacagagcgttcatcttggcctcgatctcggccttgtcgtcgcccttcaccgccgcttccagctcgcccagcgccttctcgatggtcgccttgtcctcggcggtggccttgtcgcccgcctcggtgatcatcttgcgggtcgcgtggaccagcgcgtcgccctggttgcgagcggcagccagttcctcgaacttgcggtcctcctcggcgttcgcctcggcatcgcggaccatctgctggatctcatcctcggacaggccggaggatgccttgatcacgatggactgctgcttgccggtggccttgtccttcgccgagacgtgcaggatgccgttggcatcgatatcgaaggtcacctcgatctgcggcacgccgcgcggagccggcggaatgtcggccaggtcgaacttgcccagcgacttgttctgcgcggcctgcttgcgctcgccctgcagcacgtggatggtcaccgcgccctggttgtcgtcggcggtggagaacacctgcgacttcttggtcgggatggtggtgttcttctcgatcagaccggtcatcacgccgcccagggtctcgatgccgagggtcagcggggtcacgtcgagcagcagcacgtccttcacgtcgccggccaggaccgcgccctggatggcggcaccgacagccacggcttcgtccgggttgacgtccttgcgcgcttccttgccgaagaactcggcaacggtcttctgtaccagcggcatgcgggtctggccgccgaccaggatcacttcatggatatcggaaacatccaggccggcatccttcagcgcggtgcggcacggctcgatggtgcgctgcaccaggtcttcgaccagggactccagcttggcgcgggaaaccttgacgttcaggtgcttcggaccgctcgcgtcggcagtcacgtacggcaggttgacgtcggtctgctgggtcgaggacagctcgatcttggctttctcggccgcttccttcagacgctgcatggccagcgggtcgcccttcaggttgatgccgctttccttcttgaactcgtcgacgaggtagtcgatcaggcggatgtcgaagtcttcgccgccgaggaaggtgtcgccgttggtggccagcacttcgaactggtgctcgccgtcgacttcggcgatctcgatcaccgacacgtcgaaggtaccgccgcccaggtcatagacgatcacggtgtggtcgcccttggccttgtccaggccgtaggccagcgccgccgcggtcggctcgttgatgatccgcttgacgtcgaggccggcgatgcggccggcgtccttggtggcctggcgctggctgtcgttgaagtaggccggaacggtgatcaccgcttcggtgaccggctcgccgaggtagtcttcggcggtcttcttcattttcttcagcacttcggcggaaatctgcggaggcgccatcttctggcccttcacttccacccaggcgtcgccgttgtcggccttgacgatgctgtacggcaccatctggatgtctttctgaaccacgttctcttcgaagcgacggccgatcaggcgcttcaccgcatacagggtgttctgcgggttggtgaccgcctggcgcttggccggctggcccaccagggtttcgccatcgttggtgtaggcgatgatcgagggggtggtacgcgcgccctcggcgttctcgatgaccttgacgttaccgttctccaggatagccacgcaggagttggtggtacccaggtcgatgccaatgattttgcccat

SEQ ID NO: 739 - DNA, 1096 bp, Pseudomonas aeruginosa
ttacagcccctgtttgaggctggcttcgaggtattcgtctagatcgccgtcgagcaccttgtcgcagtcgctgcgctcgataccggtacgcaggtccttgatccgcgactggtcgagcacgtaggagcggatctggtggccccagccgatgtcggacttggagtcctccagggcctgggacgcggcggtacgcttctgcatttccagctcgtacaacttggcccgcagcatcttcatcgcggtgtccttgttggcgtgctgggagcgttcgttctggcacgccaccacggtattggtcggcacgtgggtgatccgcaccgccgaatcggtggtgttcacgtgctgaccgcccgcgccggaggagcggtaggtatcgatgcgcaggtcggccgggttgatctcgatctcgatgttgtcgtcgatttccggcgatacgaacaccgcggtgaacgaggtgtggcgacggttgccggagtcgaacggactcttgcgcaccaggcggtgcacgccgatctcggtgcgcagccagccgaaggcgtactcgcccttgatgtgcacggtggcgcccttgatgccggcgacctcgccctcggacagctcgatgatagtggcgtcgaagccgtgcttgtcggcccagcgcaggtacatgcgcagcagcatgttggcccagtcctgggcctcggtgccgccggagccggcctggatgtccaggtaggcgttgttcgggtccatctcgccgctgaacatgcggcggaactccagcttctcgaggatctcgcgcagacgctcgacttcgttggcaacgtcgtcgacggcgccctcgtcgtcttcctcgaccgccatgtccagcaggtcgcgggagtcggccaggccgctggtcaggtcgtccagggtttccaccacctgcgccagctgggcgcgctcgcggccgaggttctgggcgtattcggggttgttccagacgttggggtcttcgagctcgcggtttacttcgaccaggcgatcatgcttctgatcgtagtcaaagatacccccgaatggtctgggtgcgctcggagaggtccttgatgctgttgaggatcgggttgatttccat

SEQ ID NO: 740 - DNA, 492 bp, Pseudomonas aeruginosa
ttactggaccgacggcgtcgggatctcgccggaggcctgcatgcgggcgatttcctgggcgtagagggcgtcgaagttcaccggcgacagcatcagcgccgggaacgaaccgcgtaccaccaggttgtccagggcttcgcgagcgtacgggaagaggatgttcgggcagaacgcgccaagggtatggctcatgctcgacggatcgaggttcttgatcaggaagatgccggcctgctgcacttcggcgatgaaggcagtggtgtcctcgccgttcttcacggtcaccgatacggtcaggaccacttcgtagaagtcgccgtccagctgcttctggcgagtgttcaggtccaggctgatggacgggttccattcctggcggaagatttccggtgacttcggcgactcgaacgacaggtcgcgcaggtagatgcgctgcagggagaactggggttgctgctcgtcggcagcgccgttggtagcttgctcggtcat

SEQ ID NO: 741 - DNA, 369 bp, Pseudomonas aeruginosa
ttacagcacttcgggggcgagcgagacgatcttcatgaacttctcggtacggagttcacgagtcactggcccaaagatacgggtgccgatcggctcctgcttgttgttcagcaggacggcggcgttgccgtcgaagcggatgatggaaccgtcggtacgacgcacgccgtgcttggtgcgaacgaccacggcagtcatgacctggcccttcttcactttgccgcgcggaatcgcttccttgacggtgaccttgatgatgtcgccgatgccggcgtaacggcggtgggaaccgccgagcaccttgatgcacatcacacgacgcgcgccgctgttgtcagcgacatcgagcatggattgagtctgaatcat

SEQ ID NO: 742 - DNA, 294 bp, Pseudomonas aeruginosa
tcagtcttccaggacggcgaggatttcggactcgcccatcaccagcagttcctcgccatcgaccttgatggcgttgctgccggagtaaggcccgaagaccaccttgtcgcccaccttcactgccagagcgcgcacttcgccgttgtccagtacacgaccggtacctacggctaccacttcaccgcggttcggcttctcggcggcggaacccggcagcacgatgccgcctgcggtcttggtctcttcctcgctgcgacggataacgacgcgatcatgcagaggacgaagcttcat

SEQ ID NO: 743 - DNA, 336 bp, Pseudomonas aeruginosa
atgagtgacaccctgacccgcctggcggcggtgctcgaggagcgcaagaacgccgcgcccgacagctcctacgtggccagtctgtaccacaaaggcctgaacaagatcctggagaaggtcggcgaggagtcggtggaaaccatcatcgccgccaaggatgccgcggccagcggcgactgccaggacctgatctacgaaaccgccgacctctggttccactcgctggtgatgctctcggccctcggccagcatccgcaagccgtgctggacgaactggagcgccgcttcggcctttccggccacgccgagaaagccgcccgccaaccatcggcctga

SEQ ID NO: 744 - DNA, 534 bp, Pseudomonas aeruginosa
atgaccaccgttcaactgacggacgtccagacccttcgcgaccgtgcccgcaagaacatccaggaaggcgcggtcaccgaaggctattcggccgatcgccagaccgtcctgcgcctgctcaacgaagcgctcgccaccgagttggtctgcttcctgcgctacaagcgccactacttcatggccaccggccttaaggcgagcatcgccgccgccgagttcctcgagcacgccaaccaggaaatgcagcatgccgaccagttggccgagcgcatcatgcaactgggcggcgagccggacttcaatccgcgcggcctggaggagcgctcccatgccgaatacgtcgaaggcaagaccctgaaggacatggtcaccgagaacctgatcgccgagcgcatcgccatcgacagctatcgcgagatcatcacctacctcggtaacgacgaccccaccacccgacgcattttcgaggaaatcctggcccaggaagaagaacacgcagacgacatggccgacatcctcgacgacctcgcctga

SEQ ID NO: 745 - DNA, 516 bp, Pseudomonas aeruginosa
ttagaagctgtcagtggaggtgaacaggccgacgcggaggccttcggcactgtagatttcgcggccatcgacgctgacggtgccgtcggcgatggccaggaccagcgaacgattgatcgtgcgcttgatatgaatgttatacgtgaccttcttcgctgtcggcagaacctgaccgaagaacttcacttcgcccgaacctagggcgcggccgcggccggggttgccctgccagccgaggtagaaaccgaccagctgccacatggcatccaggcccaggcaaccgggcatgaccggatcgccttcgaagtgacaggcgaagaaccacaggtccgggttgatatccagctcggcgaccagctcgcccttgccatacttgccgccgacatcgctgatgtgaacgatgcgatcgatcatcagcatgttgggggcgggaagttgcgcgttacccgggccgaacagctcgccgcgactgcagcgcagcaggtcttctcgggtgaaggcgtgttgtttggtcat

SEQ ID NO: 746 - DNA, 432 bp, Pseudomonas aeruginosa
tcagcgaatgcgctcgcagacttcggtagccgcgaagaagtaggcgatctcgcgagcggcggaagcttcggaatcggaaccgtggacggcgttctcgtcgatggagacggcgaagtcggcgcggatggtaccggcgtcggctttcttcggatcggtggcgcccatcagctcgcggttcttggcgatggcgtcctcgccttccagaacctggactacaaccggaccggaagtcatgaaggaaaccaggtccttgaagaacggacgctctttgtgctcggcatagaagccaccggcttcacgctcggacagctgaaccattttagcggcgacgacgcgcaggccggctttctcgaagcgggtcaggatttcgccgatcacgttcttggaaacggcgtccggcttgatgatggacagggtgcgttgcagtgccat

SEQ ID NO: 747 - DNA, 2121 bp, Pseudomonas aeruginosa
tcaaccttgttttttaaccagcgcttcgacgatgttcgacggagcttcggcgtatttggagaattccatggagtagctcgcgcgaccctgggacatggaacgcacgtcggtcgcataaccgaacatctcacccagcggaacctcggcacgaataaccttaccggaaaccgtgtcctccatcccctgaatcagaccacgacgacggttcaggtcgcccatcacgtcacccatgtagtcctcaggagtcactacctctaccttcatgatcggctcgagcaccttgccgccgcccttctgggccaactgcttggtcgccatggaagcagcgatcttgaacgccatctcgttggagtcgacgtcatggtaggaaccatcgaaaacggtagccttcaggccgatgagcggatagccggcaacgacgccgttcttcatctgctcttcgatacccttctggatcgccgggatgtattccttcggaaccacaccgcccacgacttcgttctcgaacaccaggccttcggtgatattgcccttctcgtccacgtccgcggccgagaaacggatccagcaatgaccgaactgaccgcgaccaccggactggcgaacgaacttgccttcgatctccacgttgtccttggtgatggtctcacggtaggcaacctgcggcttgccgatgttggcctcgacgccgaactcgcgcttcatgcggtcgacgatgatgtccaggtgcagctcgcccatgccggagatgatggtctgaccggactcttcgtcggtcttgacacggaacgacgggtcttcctgggccagcttgccgagggcgatacccatcttctcctggtcagccttggtcttcggctctacagcgaccgagattaccggctcggggaagtccatgcgctcgaggatgatcggcttctcgatcgagcacagggtgtcaccggtggtgacgtccttcatgccgatcagggcagcgatgtcgcctgcgcgcacttccttgatctcttcacgctggttggcgtgcatctgcaccatccgaccgacgcgctctttcttgcctttcaccgagttcaggacggagtcgccggaactcaggacgccggagtaaacgcgggcgaaggtcagggtaccgacgaacgggtcggtagcgatcttgaacgccagggacgagaacggttcgttgtcgtcggcatgacgctcgtcttcgacggtctcgtcgtccgggctgacgcccttgatcgcagggatctcggtcggagccgggaggtagtcgatgacggcatcgagaaccagcggaacgcccttgttcttgaacgaggaaccgcagacggccggaacgatctcgcaggccagggtgcgcagacgcaggccttccttgatctcggcttcggagagctcgccctcttcgaggtacttgttcatcagctcttcgttggcttcggccgcagcctcgaccatgctggaacgccactcttcggccaggtccttgagctccgcaggaatttcttcctcgcggtaggtcatgcccttgtcgtcatcgttccagtagatggccttcatcttgatcaggtcgacctgaccgacgaagttctcttcagcgccgatggcgagctggaccggaaccggggtatgacccaggcgcttcttgatctgctcgacgacgcgtaggaagttcgcgccctggcggtccatcttgttgacgtagacgatgcgcggtacgccgtacttgttggcctgacgccatacggtttccgactgcggctctacgccggaggtgccacagaacaccacgacagcgccgtccagtacacgcagggaacgctccacctcgatggtgaagtctacgtggccgggagtgtcgatgacgtttacgcgatagttgtcgtactgaccgcgcgaacccttccagaaggtggtaacggcagcggaggtaatggtgataccgcgctcctgctcctgcaccatccagtcggtggtcgcagcgccgtcatgcacttcgcccagcttgtggttgacgccggtatagaacagaacccgctccgtggtggtggtcttgcccgcgtcaacgtgggcacagataccgatattacggtagcggttgatgggtgtagtacgggccac

SEQ ID NO: 748 - DNA, 1299 bp, Pseudomonas aeruginosa
gtgagtaccctgattcgcattgcgctgttcgccctggccctgatggcaggtgctgcgcaggctgccgacccgctggtgatctccagcggtaacgaccgtgccattcccatcgccgtggtgccgttcggcttccaggggggcaacgtgttgccggaagacatgtccaatatcatcggcaacgacctgcgcaactccggctacttcgagccgctgccccggcagaacatgatcagccagccggcgcaggccagcgaagtgatcttccgtgactggaaggcagttggcgtcaactacgtgatggtcggcaacatcgtgcctgccggcggacgcctgcaggtgcagtacgcattgttcgatgtcggcaccgagcagcaggtcctgaccggcagcgtgaccggcagcaccgatcagctccgcgacatgtcgcactacatcgccgaccagtcgttcgagaagctcaccggtatcaagggcgcgttctccaccaagatgctctatgtcaccgccgagcgtttctcggtcgacaacacccgctacaccttgcagcgctccgactacgacggcgcccgcccggtgaccctgctgcagtcgcgcgagcccatcgtgtcgccgcgcttctcgcccgatggccgccgtatcgcctatgtctccttcgaacagaagcgcccgcgtatcttcatccagtacgtcgatactggccgtcgtgagcagatcaccaatttcgagggcctgaatggcgctccggcattctcccctgacggcaaccgcctggccttcgtcctgtcgcgcgacggcaacccggaaatctacgtcatggaccttggcagccgcgccctgcgccgcctgaccaacaacctggcgatcgataccgaacccttctggggcaaggacggctctaccctgtacttcacctcggaccgtggcggcaagccgcagatctacaaaatgaacgtgaacagcggtgccgtggaccgggtaaccttcatcggcaactacaacgccaacccgaaactctcggccgacgagaagaccctggtaatggtccaccgccagcagggctacaccaacttccagatcgccgcccaggacctccagcgcggcaatctgcgggtgctgtcgaacaccactctggacgattcgcccactgttgcgcccaatggcaccatgctaatctacgccacccgccagcaggaccggggcgtgctgatgctcgtatccatcaacggacgcgtacggatacctctccctaccgctcagggcgatgtgcgcgagccttcctggtccccttacctgaactga

SEQ ID NO: 749 - DNA, 498 bp, Pseudomonas aeruginosa
ttagaacggaatgtcgtcgtcgaagctgtcgtagtcctgggccggttgcggcgccggttgctgctgcggggccggacgcgactgctgctgcggggcctgctgcgggcgctgcatgggctcgcgcggggcgcgctgcgaatcgtcgccggaggggcggccgccgagcaactgcatgttgccgttgatgtcgaccacgatctcggtggtgtagcgatcctgaccgtcctggccctgccacttgcgggtgcgcaggctgccttcgacgtagacctgggaacccttgcgcaggtactcgccggcgatctccgccaggcggccgaagaacaccacgcggtgccattcggtgcgctcctgttgctggccggtctgcttgtccttccagctctcgctggtggcgagggtgatgttggtcaccgcattgccgttgggcatgtagcgggtttccgggtcaccaccgacgttaccaaccagaatgactttgttaaccccacgggccat

SEQ ID NO: 750 - DNA, 1506 bp, Pseudomonas aeruginosa
tcaggcctgcgggcgcatgtgcgggaacaggatcacgtcgcggatcgacggcgagttggtcagcagcatcaccaggcggtcgatgccgatgccttcgccggcggtcggcggcatgccgtattccagggcattgatgaagtcggcgtcgtagtgcatcgcctcgtcgtcgccggcgtccttctccttgacctgcaacatgaagcgctcggcctggtcctcggcgtcgttcagctcggaataggcattggcgatctcgcggccgccgatgaacagctcgaagcggtcggtgacgctcgggtcttcgtcgttgcggcgggccagcggcgaaacctcgaaggggtagcgggtgatgaagtgcggctgctccagcttgtgctccaccagttcctcgaaaatcatcacctgcagcttgcccaggccttcgtggccgaggaccttggcgccggccttcttggcgatggcccgcgccttctcgacgtcgttgaggtcggcggcggtgatctccgggttgtacttgaggatcgaatcgaacaccgacaggcgcacgaacggctcgccgaagtggaagaccttgtcgccgtagggcacgtcggtggtaccgagtaccgactgggccagttcgcggaacagttcctcggtcaggtccatgttgtcttcgtagtcggcgtaggcctggtagaactcgagcatggtgaactcggggttgtgccgggtcgagacgccttcgttacggaagttgcggttgatctcgaagaccttctcgaaaccgccgaccaccaggcgcttgaggtacagctccggggcgatgcgcaggaacatggccatgtccagcgcgttgtgatgggtctcgaacggcttggccgcggcgccgccggggatggtctgcagcatcggggtctccacttcgaggaaaccgcgctcgctgaggaaacggcggatgtgggcgatgacctgggaacgcacgcggaaggtgtggcgggtttcctcgttgaccatcaggtcgacgtagcgctggcggtagcgctgctcggtgtcggtcaggccatggtgcttgtccggcagcggacgcagcgacttggtcagcaggcgcacgctggtcatgtcgacgtacaggtcgcccttgcccgagcgggccagcacgccttcggcgccgatgatgtcgcccaggtcccaggtcttgatctcggccagggtttcttccggcagggtcttgcggttgacgtagacctgcaggcgctcgctgctgtcctggaggacgatgaaggaaccgcggttgagcatgatccgaccggccaccttgaccgggatcgctgcggcttccagctcttccttggtcttgtcggcgtactgtttctgcaggtccgcgaagtaggcgtcgcggcggaagtcgttggggaaggcgatggcccgggcttcgcgcacggcggcaagtttttccttgcgctgggcgatcagcttgttttcttcctgttgcagttcgtgctggtcgagttgttggtcgctcat

SEQ ID NO: 751 - DNA, 528 bp, Pseudomonas aeruginosa
atgaggttcgttaataccctcccccttattttcggtctgactgccgccctcggcagctccatggccttggccctgccttcggaccgcgaacaaccgatccgcgtccaggccgacagcgccgaactggacgacaagcagggcgtcgcggtctaccgcggcgacgtcgtggtgacccagggcagcaccaagctgaccggcaacaccgtgaccctgaagcaggacaagaacggcgacatcgaggtcgtgacctcagtcggcaagcctgcctactacgagcagaaacccgctccggacaaggacgtgaccaaggcctatggcctgaccatccagtacttcgtcacgcagaaccgggtcgtgctgatcgaccaggccaaggtgatccaggaaggcaacaccttcgaaggcgagaagatcgtctacgacacccagcgccagatcgtcaacgcgggtcgtgccaccggctcccaggtgaccagcccgcgcccacgcatcgacatggtcatccagccgaagaaaaaggcccagtaa

SEQ ID NO: 752 - DNA, 426 bp, Pseudomonas aeruginosa
atgttcggaatcagcttcagcgaactgttgctggtcgggctggtcgccctgctggtgctcggccccgagcgcctgccgggcgccgcacgtaccgccggcctgtggatcggccgcctgaagcgcagtttcaataccatcaagcaggaagtggaacgggaaatcggcgcggacgagattcgccggcaactgcacaacgagcacatcctctcgatggagcgcgaagcgcagaagctgctggccccgctgaccggccagaatcccccgcaggaaaccccgccgccggcggccgagagcccggcgccgagcgtacccacgccgccgccgaccagcacgcctgcggttccgcccgcggacgccgcggcaccgccggcagtcgctgcctccactcccccttcgccaccgtccgagacgccgcgtaatccatga

SEQ ID NO: 753 - DNA, 324 bp, Pseudomonas aeruginosa
atgacaacgatgacgaccgagactttagtgagtggaacaacgcccgtgagcgacaacgccaacctgaaacagcacctcaccacgccgacgcaagaagggcagaccctgcgcgacagcgtggagaaggcattgcacaactacttcgcccacctcgaagggcagccggtcacggacgtttacaacatggtgctctgcgaagtcgaagcgccgctgctggaaaccgtcatgaaccacgtcaaggggaaccagaccaaggcctccgagctactcggcctgaaccgcgggaccctgcgcaagaaactcaagcaatacgatcttctttaa

SEQ ID NO: 754 - DNA, 507 bp, Pseudomonas aeruginosa
tcacgcctgctgtcgatgctgcttttccagcttcttgcggatgcggtcgcgcttgagggtggacaggtagtcgacgaacagcttgccgttgaggtggtcgcattcgtgctggatgcataccgccagcaggccttcggcgacttcctcgaaggggttgccatcgcggtcgagggccttgatccggaccttctgcggtcggtccacgttctcgtagaagccgggtaccgacaggcagccttcctggtactggtccatatcctcggtcagcggttcgaactcggggttgatgaataccctcggctcggacttgtcttcgctgaggtccatgaccacgatgcgcttgtgcacgttcacctgggtcgcggcgaggccgatgcccggggcttcgtacatggtttcgaacatgtcgtcgatcagctggcgcaccgcgtcgtcgaccacctccaccggtttggcgatggtccgcaggcgcggatcggggaattcgagaatgttcaggatggccat

SEQ ID NO: 755 - DNA, 2775 bp, Pseudomonas aeruginosa
ttacatagcttgatcttcacgttgacgataaccttggatgcctttgtcgaggaacatttccgtcttgttgcctacgatgccgccgaggcccttcaggacgatctgcaggaagatgccgcggtcggccttctcgctctgcacgaggaaggcgtcatcgtccacatccagccagtagcggttgatcaggcgcagcttccagcagcagctgtcgtattcgaagccgccgaaggcctcgagggtgcggttcttgttgtagtcgtactgccagcgggcgagcacggaccactgcggcaccagcggccagatgaccgagaaatcgtgctgcttgatgatgtcgttttcgttgccatatcggaatgtgccgcgggaggaatcaaagcgccgagcatctgcacgatagcgatagccaacgttgaccaccttgcccggatcgacttcgggctggtagtggaagatggcgctaccggactcagtacgactggtgttggggttccaattgaagtcggagttgatgcgccagtcgcggttgaaacggtactggccggcaaaggcgtagggagagcgccagctgtcattgtccaagccgctgggatctaggttgagtcgcttcagatccttctcggttaggcctggtagttggacgcgacgatcacggaagtagtaaatctggccggcactgatgctggcgcgttcgaaaccgttctcttcgatgaaacgactggtgacgcccagggacaactggttggcatcgccgatacgatccttaccggtaaagcggttctcgcgccacagagagtcgtaactgaaggacggttcactggtatcgaagaccggcaggctgtcttggtccttatatggaacgtacaagtacatggcacgcggctcgagagtttggcggaatggtgtgccggcaaaggtggtgtctcggtcgaaatacaggccgctgtcgaccttaaccaaagggagcgaacggtcctgattgctgtcaaaggactcatctcttttattcaggtcggtcttgccctggctatccaagtctagatcgtactttgtatacaaatatttcaatgtgggtgtcacataaccccagctgcgcgtcattggcaaactcatgcccggctccagatgcatacggtctcccgttgctcgggcaaggccttgaagtgacgcatctgggcgtttgccgcggatgctgccgtcgtcattgaaatagatattttcgtctagatctcgatcgaatcgaacgaactcggtgccataggtgaattgcattccacctgggttgtagggcaggaaaccgtcgaaggtaatctgtggcagccggtcatacggggttacatcggtggtggtcgccaactggtacgcctgcgcattcaaacggccagtaaaggtgtccccgcgataggtcagagtgccccgttggttgacgtacgtagtgctgcctacgccaaggtcagtatccagatcctggaagtaatagggatcactgatccgcgtgtagtcgacctcggccagccagcgcgaatcgaggccggtggtgttcttgagaccgtacagccagcggtccttgctgtagtccgggaaaccttcgcggtgatcgtccttgtcgttaaggtaggcagcgttgacgataccttcgctgctgtgggtcaggtagcggaactcgccttccagcatcatgccgcgcttggccatgtagcgcgggtacaacgtggcgtcgtagttcggcgccaggttgaagtagtacggggtgaccagggtgaagccggtgtcgctggtgctgctgaagctcggcggcaggaaaccggactggcggcggtcgtcgatcgggaaatagatgtacggggtgtagaacaccgggaaatctttgacccgcagggtcgcgttggtcgcggtgccgaagccggtggccgggttcagcttgacgttgttgcccttcagggtccaggcgttgctgctcggttcgcagcgggtgtaggtgccatccttgagcatgatgatggcgttctcgctgcgcttggcgtaaagcgcgctgccgcgggcatgggccttgtggatcacgtactcggcgttgtcgacctgggcctcgccgttgtccagctggacctgggcgtggtcgccgaccaccagcatgcccttgtcgcgcagcttgacgttgccgaccagttcgccgcggttttccagctggtgcaggttggcctcgtcgccttccacctgcatgcttccctggcgcaggaccacgtcaccggcgagggtggcgatctgtttttcctgctcgtagcgcgaagccttggcggatacgtaggtcgggctctcgtcgctgggcgcgccgtcatccatgcccggacgcaccggctcgatgtaggagccgccgcaataggggccgatttccgccaactgggcggcggtcagtttttcccgaggaatccagtcgaggtgcgaatagtccgcactgcgggatttcagcgcgcgaccgccggactcggtgaccaggcgctgggtcggctctgcctcgacggtttcgcctccgctgccggacacgctgctgcccgccgcggcggtgctgaccgaggtcgcggtatgcgccgggcgcggtggcaggttggcattggcgttctgcagcggggagcaatcccagccgccggtggccgataccttgcagtcgaactgatcggcggcctgtacagtcaatgctgcgaccggctgcagagccagcaggctgccggtgaccagcaggggaaactttcttcgaaacacgagggatttcactgccat

SEQ ID NO: 756 - DNA, 1350 bp, Pseudomonas aeruginosa
atgttggaaaaagtgctgatcgccaaccgcggcgaaatcgccttgcgcatccttcgcgcatgcaaggagctggggatcaagacggtggcggtacactccaccgccgaccgcgagttgatgcacctgtcgctcgccgacgaatcggtgtgcatcggtccggccccggccacccagtcgtacctgcagatcccggcgatcatcgccgcggccgaggtcaccggcgccaccgcgatccaccccggctacggcttcctcgccgagaacgccgacttcgccgagcagatcgaacgctccggcttcaccttcgtcggcccgaccgccgaggtgatccgcctgatgggcgacaaggtttcggccaaggacgccatgaagcgcgccggcgtccccaccgtgccgggctccgacggcccgctgccggaagatgaagagaccgccctggcgatcgcccgcgaggtcggctacccggtgatcatcaaggccgccggcggcggcggtgggcgcggcatgcgcgtggtctacgacgagtccgagctgatcaagtcggccaagctgacccgcaccgaggccggcgcggcgttcggcaacccgatggtctacctggagaagttcctgaccaacccgcgccacgtggaagtccaggtgctttccgacggccagggcaacgccatccacctcggcgaccgcgactgctccctgcagcgccgccaccagaaggtgatcgaagaggcgccggcccccggcatcgacgagaaggctcgccaggaagtcttcgcccgctgcgtccaggcctgcatcgagatcggctaccgcggcgccggcaccttcgagttcctctacgagaacggccgcttctacttcatcgagatgaacactcgcgtgcaggtggagcacccggtatctgagatggtcaccggtgtcgacatcgtcaaggagatgctgcgcatcgcctccggcgagaagctctcgatccgccaggaggacgtggtcatccgcggccatgcgctggaatgccggatcaacgccgaagacccgaagaccttcatgcccagcccgggcaaggtcaagcacttccacgcccccggcggcaacggcgtgcgcgtcgactcgcacctctacagcggctacagcgtgccgccgaactacgactcgctggtcggcaaggtcatcacctacggtgccgaccgcgacgaggcgctggcgcggatgcgcaatgccctggacgagttgatcgtcgacggtatcaagaccaataccgaactgcacaaggacctggtgcgcgacgccgccttctgcaagggcggggtgaacatccattacctggagaagaaactgggtatggacaagcactga

SEQ ID NO: 757 - DNA, 1287 bp, Pseudomonas aeruginosa
tcagccgcgatccttgagggcggtgaagtcgcgctgggtgtggccggtatagagctggcgcgggcggccgatcttgtaggggccggagagcatttcctgccagtgcgagatccagccgacggtacgcgccagggcgaagatcacggtgaacatgctggtcggaatgccgatcgccttgaggatgatccccgagtagaagtcgacgttcgggtacaggttgcgttccacgaagtaggggtcgtggcgggcgatttcttctagcttcatcgccagttccagttgcgggtcgttgatgcccagctcctggaggacctcgtcgcaggtctgcttcatgaccttggcgcgcgggtcgaagttcttgtagacacgatggccgaagcccatcagcttgaacggatcgttcttgtccttggccttctcgacgaacttgtcgatgttggacacgtcgccgatctcgtcgagcatgcgcagcaccgcttcgttcgcgccgccatgggccggtccccacagggcggcgatgccggaggcgatgcaggcgaacggattggcgccggaggagccggccagacgcaccgtggaggtggaggcgttctgctcgtggtcggcgtggagaatgaagatgcggtccatggccttggccagcacggggctgatcggcttggtctcgcagggggtgttgaacatcatgtgcaggaagttttccgcgtagttcaggtcgttacgcggatacatcatcggctcgcccttggagtacttgtacaccatggcggcgatggtcggcatcttggcgatcaggcgatgcgcggagacttcgcgatgcttcgggttattgatgtccagggagtcgtggtagaaggccgagagggcgccgatcacgccgcacatcacggccatcgggtgggcgtcgcggcggaagccgttgaagaaggtcttcaactgctcgtgaaccatggtgtggttcttgatggtgccgacgaactgttccttctgcgcggcggtgggcagctcgccgttcagcagcaggtagcaggtttccaggtagtcggatttctctgccagttgctcgatggggtagccgcgatggaggaggacgcctttgtcgccgtcgatataggtgatcttcgactcgcaggaggcggtcgacatgaagccaggatcgaaggtgaagtggcccgtggcggtgaggccccgtacatccactacatcgggacccatggtaccggataggacgggcagttcgacgggggctgagccctcgatgatcaactgcgcttttttgtcagccat

SEQ ID NO: 758 - DNA, 276 bp, Pseudomonas aeruginosa
ttaacgcttggctttcttgtccgcagcatgcccgcggtaggtgcgggtagcggcgaactcgcccagtttgtggccgaccatgtcctcgttgacgagaaccggtacgtgttgacggccgttgtgcacggcgatggtcagaccaaccatatgcggcagaatcatcgaacgacgcgaccaggtcttgatcggcttgcggtcgttcttttccaccgcgacttcgaccttcttcaacaggtgaagatcgataaacggaccttttttcagtgaacgtggcac

SEQ ID NO: 759 - DNA, 3174 bp, Pseudomonas aeruginosa
atgaaaagaatgctgatcaacgcgactcaacccgaggagttgcgtgttgcactggtcgacggccaacgcctgttcgacctcgacatcgagtcgggcgcccgcgagcagaagaaggccaacatctacaaaggccgcatcactcgcgtcgaacccagcctcgaagccgccttcgtcgacttcggcgccgaacgccacggcttcctccccctcaaagaaatctcccgcgaatacttcaagaaatcccccgaaggccggatcaacatcaaggaagtcctgagcgaaggccaggaagtcatcgtccaggtcgagaaggaagagcgcggcaacaagggcgccgccctgaccaccttcatcagcctggccggccgttacctggtgctgatgccgaacaacccgcgcgccggcggcatctcccgccgtatcgaaggcgaagagcgcaacgagctgcgcgaggccctgaacggcctcaacgcaccggccgacatgggcctgatcgtgcgcaccgccggcctcggccgcagcaccgaggaactgcagtgggacctcgactacctgctgcaactgtggagcgcgatcaaggaagcgtccggcgaacgtggcgcgcccttcctgatctaccaggaaagcaacgtcatcatccgcgccatccgcgactacctgcgccaggacatcggcgaagtgctgatcgacagcatcgacgcccaggaagaagccctgaacttcatccgccaggtgatgccgcagtacgccagcaaggtgaagctgtaccaggacagcgttccgctgttcaatcgcttccagatcgagagccagatcgagaccgctttccagcgcgaagtgaagctgccgtccggcggctccatcgtcatcgacccgaccgaggccctggtttccatcgacatcaactcggcgcgcgccaccaagggcggcgacatcgaggaaaccgccctgcagaccaacctggaagcggccgaggaaatcgcccgccagctgcgcctgcgtgacatcggcggcctgatcgtcatcgacttcatcgacatgaccccggcgaagaaccagcgcgccgtggaagagcgtgtccgcgaagccctcgaggccgaccgcgcgcgcgtccaggtcggtcgcatctcgcgcttcggcctgctggaaatgtcccgccagcgcctgcgtccgtccctcggcgagaccagcggcatcgtctgcccgcgctgcaacggccagggcatcatccgcgacgtcgagtcgctgtcgctggccatcctgcgcctgatcgaggaagaagccctgaaggaccgcaccgcggaagtccgcgcccgcgtgcccttccaggtcgccgccttcctgctcaacgagaagcgcaacgccatcaccaagatcgaactgcgtacccgcgcgcgcatcttcatcctgccggacgatcatctggaaaccccgcatttcgaagtccagcgtctgcgcgatgacagccccgaactggttgccggccagaccagctacgaaatggccaccgtcgagcacgaagaagcccagccggtcagctcgacccgcaccctggtccgccaggaagcagcagtcaagaccgtcgctccccagcagcccgcaccgcaacacaccgaagcaccggtcgagccggccaagccgatgcccgagccgagcctgttccagggcctggtgaagtccctggtcggcctgttcgcaggcaaggatcaacctgccgccaagcctgctgaaaccagcaagccggctgccgagcgccaaacccgccaggacgagcgtcgcaacggccgccagcagaaccgccgccgcgatggccgcgatggcaatcgccgcgacgaagagcgcaaaccgcgcgaggagcgtgcagagcgtcaaccgcgcgaagagcgcgccgaacgcccgaaccgcgaagagcgcagcgaacgtcgccgcgaagagcgcgccgagcgcccggctcgcgaggagcgccagccgcgcgaaggccgtgaagagcgcgccgagcggacaccccgcgaagagcgccagccgcgcgaaggccgcgaaggtcgcgaggaacgcagcgaacgccgccgcgaagagcgcgccgaacgcccggcccgcgaagagcgccaaccccgcgaaggccgtgaagaacgcgccgagcgcccggcccgcgaagagcgccagccgcgcgaggatcgccaggctcgcgacgccgcggccctggaagccgaggcattgccgaacgacgagagcctggagcaggacgagcaggacgataccgatggcgagcgcccgcgccgccgctcccgcggccagcgtcgtcgcagcaaccgccgcgaacgccagcgcgaggtcagcggcgagctggaaggcagcgaggcgaccgataacgccgccgcgccgctgaacaccgtcgcagccgccgccgctgccggtatcgctgtcgccagcgaagccgtagaagcaaacgtggagcaagccccggccactaccagcgaggctgccagcgaaaccacggcaagcgatgagaccgacgcgtcgaccagcgaagccgtcgaaacccagggcgcggacagcgaggccaataccggcgaaaccgccgacatcgaagcgccggtgaccgtcagcgtggtccgggacgaagccgaccagagcaccctgctggtcgcgcaagccactgaagaagctcccttcgccagcgaaagcgtggaaagccgcgaagacgccgagagcgccgtgcaaccggcaacggaagcggccgaagaagttgccgctccggtgcccgtcgaagtagcagcccctagcgagcccgcagccaccgaggagccgaccccggccatcgcggcggtgccggccaacgcgactggccgtgccctcaacgacccacgggaaaaacgtcgcctgcaacgcgaagccgagcgtctggcacgcgaagccgcagcagcagccgaagcggcagctcaggccgctcccgccgtcgaggagatcccggctgtagcgagcgaggaagcgtcggcccaggaggaacctgctgcaccccaggctgaagaaatcacccaggccgacgttccgtcccaggcggacgaagcccaggaagcggtacaggccgagcctgaagcttccggcgaaggcgccgccgacacggagcacgcgaaaaagaccgaggaaagcgaaacctcgcgcccgcatgcctga

SEQ ID NO: 760 - DNA, 282 bp, Pseudomonas aeruginosa
tcagcgatattcgcagaggtaggcggtgtcctgggcgaccttgagctggaacttgctgttcgccgggacggtgaactggctgccgctggcgtattcctgccactcgtcgctgcccggcagcttgaccgtcagcgcgccggcgaccacatgcatgatctccagctggctggtgccgaactcgtattcgcctgccgccatcacgccgatggtggccgggccggcggtcatgtcgaaggcgatggatttgacggtgccgtcgaagtattcgttgaccttgaacat

SEQ ID NO: 761 - DNA, 840 bp, Pseudomonas aeruginosa
atgatcaagaaatgtcttttcccggccgccggttacggcacccgtttcctccccgccaccaaggccatgcccaaggaaatgctgccggtggtgaacaagccgctgatccagtacgcggtggaggaggcgctggaagccggcctttccgagatcggcatcgtcaccggccgcggcaagcgttcgctggaagaccacttcgacatcagctacgagctggaacaccagatccgcaacaccgacaaggaaaagtacctggtcggcatccgtcggctgatcgacgagtgcaccttcgcctacacccgccaggtggagatgaagggcctcggccacgccatcctcaccggtcgtccgctgatcggcgacgagccgttcgccgtggtcctggccgacgacctgtgcctgaacctcgaaggcgacagcgtgctgaagcagatggtcaagctgtacaaccagttccgctgctccatcgtggcgatccaggaagtgccgccggaagagaccaacaagtacggcgtgatcgccggcgagatgatccgcgacgatatcttccgggtgaacaccatggtcgagaagccgaagccggaagaggcgccgtcgaacctggcgatcatcggccgctacatcctgaccccggacatcttcgacctgatcgagcagactgaaccgggcaagggcggcgagatccagatcaccgatgccctgatgaagcaggcccaggacggctgcgtgctggcctacaagttcaagggcaagcgtttcgactgcggcagcgccgagggttacatcgaggcgaccaacttctgctacgaaaacctctacaagaccggcaaggctcactga

SEQ ID NO: 762 - DNA, 2106 bp, Pseudomonas aeruginosa
ttacacgccggaagcttcggcggcagccacgtccttgatcgacagcttgatgcggccacggttgtccacgtcgagcaccaggaccttcacttcctggccttcctgcagcacgtcggtgaccttgtcgatgcgcttgtcgctgatctgcgagatgtgcaccaggccgtccttgcccggcaggatgttgacgaaggcaccgaagtcgacgatgcgctccaccttgccgacgtagatcttgccgatctcggcttccgcggtgatcgccaggacgcgcagcttggcggcctcggcggcttccttggtttcgccgtagatcttcacgctgccatcgtcctcgatgtcgatcgaggccttggtctcttcgcagataccacggatggtcgcgccgcccttgccgatgacgtcgcggatcttgtccgagtcgatcttcatctgcagcatggtcggggcgttctcggacagctcggcgcgcggcttggcgatgacctggttcatctggccgaggatgttcaggcgagcttccagggcctggcccagggcgatctccatgatctcttcggtgataccgttgatcttgatgtccatctgcagggcggtgacgcccttgtcggtaccggcaaccttgaagtccatgtcgcccaggtggtcctcgtcaccgaggatgtcggtcaggacggcgaacttctcgccttccttgaccaggcccatggcgataccggcgaccggcgccttgaccggcacaccggcatccatcagcgccagggaggcgccgcacacggaggccatcgagctggaaccgttggactcggtgatctcggaaaccacgcgaatggtgtaggggaactcgtcctgggtcggcagcatggcggcgacgccacgacgggccagacggccatggccgatttcacgacgacccgggctgcccatgcggccgcactcgcctaccgagaacggcgggaagttgtagtgcagcatgaaggcgtccttgcgctcgccttccagggtatccagcagctgggcatcacgcgcggtgccgagggtcgcaacgaccagggcctgggtttcgccacgggtgaacagcgcggaaccgtgggtcttgccgagcacgccgacttcgatgcgcagcggacgcacggtacgggtgtcacgaccgtcgatacgcggcttgccgttgacgatgttctcgcgaacggtgcggtattccagcaggccgaatacgtccttgacctcggaagccgggaacttgccctcttcctcgccggcgaacagggccacggcctggtcgcgcagctcgcccagacggttgtagcggtcctgcttgatggtgatggtataggcctgggagatcgcttcgcccagctctgccttgatggcgttgaccagcacggtgttttccgccggggctttccagtcccaggccggcttgccagcttcggcggccagctccttgacggcacggatcaccgcctggaactcgtcatgggcgaacagcacggcaccgagcatctggtcttcggtcagttcgtcggcctcggactccaccatcagcacggcgtcttcggtaccggccacgaccatgtcgaggctggaactctgcagttgctcgtaggtggggttgaggatgtagccgatttccggatggaaaccgacgcgggcggcgccgatcgggccggcgaacggaatgccggagatcgccagggcggcggaggtgccgatcatcgcggcgatgtccggatcggacttcttgttggtggagacgacggtgcagacgacctgcacttcattcatgaaaccttcggggaacagcggacggatcggacggtcgatcaggcgcgaggtcagggtttccttctcggaaggacgtccttcacgcttgaagaaaccaccggggatacggcctgcggcgtaggtcttttcctggtagtgcacggacagcgggaagaagtcgcggccttcggccggcgacttggcgccgaccacggtgaccagcacgctgacgtcgtccatggtgaccagtacggcgccggtggcctggcgagcgatacggccggtctcgagagtgacggtcgactgaccgaactggaattgcttggttaccgggttcac

SEQ ID NO: 763 - DNA, 786 bp, Pseudomonas aeruginosa
atgagcggcataggcgcgcttttccgaccgctgccccgcatgggtccgcggctgcccttcgaactacccgcgccgccccggccgcacttgccgatgccggcgccgcgcccgctgccgcgaccggcccccggcgcactgcccaggccggtaccgcgtccgatgccggtgccgcagaccctgcccaggaccgagaccggcacgctgagccgcgaccggacccgggaagccgagcgcgattgcagcaagagccagggccgcgacaaggactgcgtggagtgcccgccgtcccggggcgaaatggccatcgccaataacggcaagggccacagcatgtcggacctgtccgcgcgctaccagcagtgggtgaccaatttcccgtttccccacgaatggttctggagcggcacctggtgggacggcttcgacgagccgcgctgcaccctgctggaggcgaaggccaactacgccttcctgttcgtcccgctgctcggcgtgcccaggccctgggcacgggccaaggtgaagtcggacctgctgcagaaggccgaggtccacagcgacaaggcccgaccgaccccgccggtgttcgtcgaatggcacttcctgcagcggatcgtctacgagtactgcgccgcggagtacctgcgcatgggactggccaacctgaaggcattctggaatccgatgccgggaacggacgagcacgacgactaccaggaaacccgcgcgaaggaacaggaagagatgaaaaggttttgcgaagagaacccggggtattgcgcatga

SEQ ID NO: 764 - DNA, 357 bp, Pseudomonas aeruginosa
ttacatcgtgtgggtcggccggtccgacttcagcgccccggccaggtaggtttcgatcttgttgcgggcggtgttgtcaccgtcgttgaactgcacgccgatgccagccgcacggttgccctgggcgcccttcggggtgatccagacgaccttgccggccaccgggatcttctccggctcttccatcaggttgagcagcatgaagacttcgtcgccgagcttgtagttcttgttggtgggaatgaacagcccgccgttcctgatgaacggcatgtaggcggcgtacagcacggacttgtccttgatggtcaaggacaggatgccgttacgcggccccagattgggtggcaaactcat

SEQ ID NO: 765 - DNA, 594 bp, Pseudomonas aeruginosa
atggacatgcaacaccgtatccgccagctcttccaggccagcatcgagaccaagcagcaggcgctggaagtactgcctccctatatcgagcaagccagcctggtgatggtcaatgcgctgctcaacgagggcaagatcctctcctgcggcaatggcggctcggccggcgatgcccagcacttctcctccgaactgctcaaccgcttcgagcgcgaacgtccgagcctcccggccgtggccctgaccaccgacagctcgaccatcacctcgatcgccaacgactacagctacaacgaagtcttctccaagcagatccgcgccctgggccagccgggcgacgtcctgctggcgatttccaccagcggcaattcggccaacgtgatccaggccatccaggcggcccacgaccgcgagatgctggtggtcgccctgaccggccgcgacggtggcggcatggcttcgctgctgctgccggaagacgtggagatccgcgttccttccaagatcaccgcacgcatccaggaagtccacctgctggccatccactgcctctgcgacctgatcgaccgccaactgttcgggagtgaagaatga

SEQ ID NO: 766 - DNA, 249 bp, Pseudomonas aeruginosa
atgggcatttttgactggaaacactggatcgtcatcctgatcgtcgtggtactggtgttcggcaccaagcgcctgaagaacctcggttccgacgtcggcgaagcgatcaagggcttccgcaaggcggtgaacaccgaggaagacgacaagaaggaccagcccgccgcccagccggcccaaccgctgaaccagccgcacaccatcgacgcccaggcgcagaaggtcgaagagccggcgcgcaaggactga

SEQ ID NO: 767 - DNA, 648 bp, Pseudomonas aeruginosa
tcagctcagggccgaaagcactttcgcggtgatctgctcgaccgagccgacgccggcgatgctgtggtatttcggggtgccttcggcggccgacagcttctggtagaagtcgaccagcggcttggtctgcgaatggtagaccgacaggcggtgacgcacggtctcttccttgtcgtcctcgcgctggatcagctcttcgccggtaacgtcgtccttgccggcgaccttcggcgggttgtgctcggtgtggtacacgcggccggaggccggatgcacgcgacgaccggcgatacgcgacacgatctcctcgtcgtcgacggcgatctcgaccacatggtcgatggtcacgccggcgtccttcagcgcttcggcctgcgggatggtccgcgggaagccgtcgaacaggaagcccttggcgcaatcggcctcggtgatgcgttccttgatcagggcgatgatgatgtcgtcggataccaggccgccgctgtccatcacgcctttcacctgctggccgagcgggctgccggccttgactgcggcgcgcagcatgtcgccggtggagatctgcggaatgccgaacttctcggtgatgaaccgtgcctgggtgcctttgccggcaccgggtgccccgagcagaatcacacgcat

SEQ ID NO: 768 - DNA, 807 bp, Pseudomonas aeruginosa
tcagcgtaggccgagcacatcctgcatgtcgtacaggccgttctccttgccctccagccacagcgccgcacgcaccgcgccacgggcgaaggtcatgcggctggaagccttgtgggtgatctccacgcgctcgccctcggcggcgaacagcacggtgtggtcgcccaccacgtcgccggcgcgcacggtggcgaagccgatggtttcccgcgcccgcgcgccggtctgcccctcgcgtccgtagaccgccacttcctggaggtcccggccgagcgcctgggctaccacctcgcccatgcgcaaggcggtgccggacggtgcatcgaccttgtgccggtgatgggcctcgatgatctcgatatccacttcgtcgcccaacacccgtgccgcggtatccagaagcttcaggcaaaggttcacgccgacgctgaagttggcagcgaagacgatcgggatatccttcgccgcctcggccagcagcagcttctcgtcggcgctgaagccggtggtgccgatgaccatcgcccggcgcgccttgcggcactgctcgatgttcttcagggttacggagggatgggtgaagtcgatcaggacgtcgaactcctcgcagaccttgcccaggtccccggacagcggcacgccgatccggccgagaccggccagctcgccggcgtccgcccccaccagggtgctatccggacgatccaccgccgccgtcagcccggcggcaccgccggtctgctgaacggcctcgatcaggttcttgcccatgcgcccggcggcgcccactacggctatacgtcgcat

SEQ ID NO: 769 - DNA, 1470 bp, Pseudomonas aeruginosa
atgttcgatcttttcagcgggctcgatgcctgggtgggtatcagcctggtgctggccctggccttcgtcctcaccttcgagttcatcaacggcttccacgacactgccaacgcggtggccaccgtcatctacaccaaagcgatgtccccctaccgggcggtgatgctctccggtgtgttcaacttcctcggcgtgctgctcggcggtgtcggtgtagcctacgccatcgttcacctgctgccggtggagctgctgatcaacgtgaacaccggccatggtctggcgatggtcttctccctgctcgccgccgccatcgcctggaacctcggcacctggtacttcggcatcccggcctccagctcgcacaccctgatcggctcgatcctcggcgtcggcctggccaatgcgctgatcaccgacgtgccgctggccgaagggatcaactggcagaaggcgatcgacatcggcctgtcgctgatcttctcgccgctggccggcttcatggtcgccgcgttggtcctgctcggactgaaatggtggcgtccgctgtcgaagatgcacaaaaccccggaaacccgtcgcgaactcgacgagaagaagcacccgccgttctggaaccgcctggtgctggtgctttccgccatggcggtaagcttcgtccatggctccaacgacggccagaagggtatcggcctgatcatgctggtactgatcggcatcgtcccggccaagttcgtcctcgacctgaacagcaccacctaccagatcgagcgcacccgcgacgccgccctgcacctcagtcagttctaccagcgccacaccgataccctcggcgacatgctggccctgggcaagagcaatggcagcgagatgccgcagttctaccgctgcgatccgaaacagaccgagccgaccatcaacgcgctgctccgcgacctgcgcggcgtgcccagctacaacgacctggacgccgacgagcgcgtgcaggtgcgtcgctacctgctgtgcctggacgacaccgcgaagaaggtcggcaagctgtccgacctgccggcgcgggagaaggccgacctcgagaagctacgcaaggacctgaccgcgaccaccgaatacgcgccgttctgggtcatcatcgcggtggccctggctctcggcatcggcaccatggtcggctggaagcgcgtagtgctcaccgtcggcgagaagatcggcaagcagggcatgacctacgcccagggcatgagcgcgcagatcaccgccgccgccgccatcggcatggccaacatctacagcctgccggtgtccaccacccatgtactgtcctccggcgtggccgggaccatggtggcgaacaaaagcggcctgcacggcggcaccgtgcgcaacatcctgatggcctgggtgctcaccctgccgacttcgatggcgctgtccgccggcctgttctggctggcctcgcaattcatctga

SEQ ID NO: 770 - DNA, 957 bp, Pseudomonas aeruginosa
ttattcggcgctcttctcgccgtgcgacaggctgtatacgtaggcggccagcaggtgcaccttgtcgttgcccaggtgttcctgttgcgccggcatcacaccctggcgaccgtagcggatggtctgctgcagttgcgcgaagctggagccgtagatgaacgcgccggggtgggtcagatcgggagcgcccatcgccggggtgcccttgccttccggaccgtggcaggcgacgcaggtggtagcgaagacctgcttgccggcctcgatgtctgccttggcgccttccggcagcttacggccatccatctgggtgaggacgaaagcggcgacgttcttcacgccttcctcgccgatcacttcaccccaggccggcatggcggcgtggcggccagccatgatggtggtcttgatggtttccggctcgccgccccagcgccagtcggcgtcggtcaggttggggaagccgtaggcgcccttggcgtcggagccgtggcagatcgagcagttggaggcgaacaggcgaccgcccattttcaccgcctgcggatccttggcgacttcctcgatgggcatcgcggcgaacttggcgaagatcgggccgtatttctcgtcggccttggccatttccttttcccactggtggacgccggtccagcctttttccttgtcggcgaattcgtcggcggactggtagcccggcatcaggcctttccaggtgcccaggcccgggtacagggccaggtaccccacggcgaacaccagggtgccgacgaacagcatgaaccaccacttcggcagcgggttgtcgtactcctcgatgccgtcgtaggagtggcccacggtctcgtcggtggtgctgctgcgctggcccttgcgggtggcgaagatcagccaggtcagcgccagcagggtgccgagggtgagagctgtaatgtacagactccagaaggtcgtcat

SEQ ID NO: 771 - DNA, 594 bp, Pseudomonas aeruginosa
tcacaggcaccctttggtcgacggcatctgcccggccatccgctcgtccagctcgatggccatgcgcagcgcgcggccgaaggccttgaacacggtctcgatctggtggtgggtgttgtgcccgcgcaggttgtcgatgtgcagggtcacctgggcgtggttgacgaagccctggaagaattccatgaacaggtcgacgtcgaagccgccgacgctggcacgggtaaagggaacgtgcatctgcaggccgggccgcccggagaagtcgatgaccacccgcgacagcgcctcgtcgaggggcacgtaggcgtggccgtagcggcggatgcccttcttgtcgccgatggccttggcgaaggcctggccgagggtgatgccgatgtcctcgacggtgtggtgatcgtcgatatgcaggtcgcccttgcactcgatgtccaggtcgatcaggccgtggcgggcgatctggtccatcatgtggtcaaggaagggaaccccggtatcgaaccgggccttgccggtcccatccaggtcgatggagaccttgatctgggtctccagggtgtcgcgcgcgacggatgccttgcgttcggccat

SEQ ID NO: 772 - DNA, 2148 bp, Pseudomonas aeruginosa
ttaaccgaagaatttctgaccgttcttggccatttcacgcagcttcgcggtcgggtggtacagcgcgcccagctcggcgtacttgtcggccagggccacgaactcggcgacaccgatcgaatcgatgtagcgcagagcaccaccacggaagggcgggaagccgatgccgtagatcaggcccatatcggcctcggcagcggtctcgacgatgccgtcttccaggcaacgcacggtttccaggcacagcgggatcatcatgaagttgacgatgtcctcgtcggtcacttcgcgctgctcgaccacgatcggcttgagcacttcgtaggcctgcggatcggtgaccttcttcggcttgccgcgcttgtcggtctcgtaggcgtagaagcccttgccgttcttctggcccaggcggttggcctcgtacatcacgtcgacggcggtcttgccctcgaccgccatgcggtccgggaagccctcggccatgacgtcgcggccatggtggccggtgtcgatgccgaccacgtcggacaggtaggccgggcccatgggccagccgaacttctccatcaccttgtcgatgcgcacgaagtcgacgccgaagctcagcagcttggcgaagccgccgaagtacgggaacagcacacggttgaccaggaagcctgggcaatcgttgaccacgatcgggctcttgcccatcttcttggcgtaggcgacggtggtggcgatggcggtttcaccggtcttctcgccacggatcacttccaccagcggcatcatgtgcaccgggttgaagaaatgcatgccgcagaagttttccggacgcttcagcgcctgggccagcaggctgatggagatggtcgaagtgttggaggcgatgatcgcgtcttccttcaccgcgccttccacttcggcgagcacggcttgcttgaccttggggttctcgacgacggcttcgacgacgatgtcgacgttgccgaagtcgccataggacatggtcggacggatgccattgagcgcctcggccatcttcgccggggtcaggcgacccttctcgacgcgcttgccgagcagcttggcggcctcgttcaggcccatctggataccctcttcgcggatatccttcatcaggatcggggtgcccttgagcgccgactgataggcgatgccgccgcccatgatgccggcgccgagcacggcggccagtttcacgtccttggcgacttcgtcgtatttcttggctttcttcttcagttcctggtcattcaggaacaggccgatcagactctgcgcgaccgaggtcttggccagcttgacgaagccggcggcttcgacttccagcgccttgtcgcggccgaagttggcggccttctggatgctcttgatggcttccaccggcgccgggtagttcggaccggcctggccggcgacgaagcccttggcggtttcgaaggccatcatctgctcgattgcattcagcttcagcttttccagcttcggctggcgccgtgccttgtggtccagctcgccggcgacggcgcgcttggccaggtcgagggcagcggcctgcagttgctcgggagcgaccacggcatcgacggcgccgaccttcagggcgtcctcggccttgttttccttgcccgaggcgatccactcgacggcgttatcgcagccgatcaggcgcggcaggcggacggtgccgccgaagcccgggtagatgcccagcttgacttccggcaggccgaccttggcggtcgcgctcatcacgcggaagtccgcggccaggcacatctccaggccgccgccgagggcgatgccgttgatcgcggcaacggtgggtacgtccaggtcttcgaagtcgctgaagatcttgttggcttcgaggttgcccgccatcagttcctcgtcgggcagctggaagttgtcaacgaactcggtgatgtcggcaccaacgatgaacacgtccttgccgctggtcacgatcacgcccttgaccgatgcatcggccttgatcgcatcgactgccgcacgcaactcactgagggtgagacggttgaacttgttgacggactcgcccttgagatcgaaattcaactcgacgatgccgccctcaagaggcttaaccgtgatggctttaccttggtaaatcat

SEQ ID NO: 773 - DNA, 996 bp, Pseudomonas aeruginosa
atgtccgattcccgcctggtcgatcccttcggccgtcgcatcacctacctgcgcctgtcggtgacggatcgctgcgacttccgctgcacctactgcatgagcgaagacatgcagttccttccccgcgaccaggtcctcagcctggaagaactgtacgcggtggccgacgccttcatcggcctcggcgtgcggcgcattcgtatcaccggcggcgagccgctggtgcgcaagggcatcaccggcctgctggcacgcctggggcagcgtgcggaactggaagacctggcgatcaccaccaacggttcgcaactgcgcgagcgcgccgccgagctgaaggccgccggcgtccgccgcctcaacgtcagcctcgactcgctgcagcgcgaacgcttcgccgccttcacccgtagcgatcgcctggagcaggtgctggacggcatccaggcggcgcgcgaagccggtttcgagcggatcaagctgaactgcgtggtacagaagggccgcaacgacgacgagatcctcgacctggtcgagtacgccctggccaaccagttggacatcagtttcatcgaggaaatgccgctgggcagcatcaccagccaccgtcgcgaactgactctctgcaccagcgacgaagtccgcgcgatcatcgagcgccgctggccgctgaccccgagcctggcgcgcagcggcgggccgtcgcggtattaccagatcggcgacgagcccagccggatcggcttcatctcacctcacagcaataatttctgcggcgactgcaaccgcgtgcgcgtcaccgccgagggcaagctggtgctctgcctcggccacgagggggcgctcgacctgcgcgaactgctgcgcagtcatcccggcgaccgcgagcgcctgagcgcggcactggtggcggcgctgaacctgaagccggagcggcatcacttcgacgcccaggagcaggtccaggtgctgcgtttcatgagcatgaccggcggctga

SEQ ID NO: 774 - DNA, 1023 bp, Pseudomonas aeruginosa
ttgaacgccccccaggaacttcatcgctttatcctcgagccgttcgacgcccgcagcttcgcgacactttgcgggcagttcgacgagcatctccaccagatcgagaaacgcctcgacatcgagatccgcaaccgcggcaaccagttcgaactggccggcgaaccgcgccggaccaaggtcgccgaacgcctgctgcagcgtctctaccgcgaggcgcagaacggcaccgatctcacccccgacaccgtgcacctgtacctgcaggagtccggcctggaagacctcgaggaattgcagagcgcgccgcaggtcaccctgaagtcgcgcaaggcgcacatccgcccgcgcggcgccaaccagcagcgctacgtcaaggcgatcctcgaccacgacatcaacttcggcatcggcccggccggcaccggcaagacctatctcgccgtggcctgcgccgtcgacgccctggagcgcgagcagatccgccgcatcctgctggtgcgcccggcggtcgaggccggcgagaagctcggtttccttcccggcgacctgtcgcagaagatcgacccctacctgcgtccgctctacgacgcgctctacgagatgctcggcttcgaacacgtggccaagctgatcgagcgcaacgtcatcgaggtcgcgccgctggcctacatgcgcgggcgcacgctgaacaacagcttcatcatcctcgacgagagccagaacaccacagtcgagcagatgaagatgttcctcacccggatcggcttcggctccaccgcggtgatcaccggcgacgtcacccaggtcgacctgccccgcggcacccgctccggcctcaagcacgtgatcgaggtcctgcaggacgtccccggcatcagcttcacccacttcaagcccaaggatgtggtccgccacccgctggtgcagcgtatcgtcgaagcctacgagcgtcacgagagccgccagcaaggccaggtgcggccggtcgagggaacgggcaagggcggtcacgatgccgcttga

SEQ ID NO: 775 - DNA, 1245 bp, Pseudomonas aeruginosa
tcagtcggcgaacctgcggaacaccagggtgccgttggtcccgccgaaaccgaacgagttcgacagggccacgtcgatcttgcgcggcttggcttcatgggccaccaggtcgaggtcgcaaccttcgtccgggttgtccaggttgatggtcggcggggcgacctggtcgcgcagggccagcacgctgaagatcgcctccaccgcaccggcggcacctaacaggtggccggtcatcgacttggtcgaactcatcgacagcgcatgggcatgctcgccgaacacgctcttcaccgcggcgatctcggcgatgtcgccggccggggtggaggtgccatgggcgttgatgtaatcgacctgacgaggatccaggccggcatcgcgcagcgcgttcttcatgcagcgggcggcaccggcgccgtcttccggcggcgcggtcatgtggaaggcgtcgccgctcatgccgaagccaaccagctcggcatagatccgcgcgccgcgggcacgggcgtgctccagttcttcgagcaccagggcgccggaaccgtcggacaggacgaagccgtcgcgatcccggtcccacggacggctggcacgggtcggctcgtcgttgcgagtggagagcgcgcgagccgcgccgaaaccacccaggccgagaccgcaggcagccatttcggaaccgccggcgaccatcacgtcggcctcgccataggcgatgttgcgagcagccatgccaatgctgtgggtaccggtggtgcaggcggtggtgagggcgtagttgggcccctgcagacccaggtggatcgacaggaagccggaaaccatgttgatgatcgaaccgggcacgaagaacggcgagatgcgccgcggcccctgctcgaacagggatcggcagttgttctcgatattggtcaggccgccgataccggaacccatggatacgccgatacgctcacgattggcgtcggtgacctccaggccggaatcgcgaacggcctggaagctggcggcgagaccgtactggatgaacaggtcgagcttgcgggcttccttggcggacaggtattcctcgacattgaaacccttgaccgaaccaccgaagcgggtggaataggcggacaggtccatatgctcgatcggggcgatcccgctgcgaccggcgagaataccttcccaactgctcgggacatccaggcccagcggcgacagcatgcccatgccagtaatgacgacgcgtctacgcgacac

SEQ ID NO: 776 - DNA, 306 bp, Pseudomonas aeruginosa
atgagcatgcgtgaccgtatccagaccgccctgcagcccctcgatccgcaacacgtcgaggtgctcgacgagagccacatgcacagccgcgggctggagacccacttcaaggtggtgctggtcagcccgcagttcgccgggttgaacgcggtgaagcggcaccagaaggtatatgccaccctcggtgggttgatgggcgagttccacgccttggcgctgcataccttcacccctgaggagtggagccaggctgcggtgccggcctcgccgacctgccgcggcgggagcaagcacgacataccctga

SEQ ID NO: 777 - DNA, 156 bp, Pseudomonas aeruginosa
ttacttgatcttggcttccttgtagatcacgtgctgacgaacgaccggatcgtacttcttgatctcgatcttctcaggcttggtacgcttgttcttgtcggtggtgtagaagtggccggtaccggcgctggacaccagacgaatcaattcacgcat

SEQ ID NO: 778 - DNA, 1194 bp, Pseudomonas aeruginosa
gtggtcgaaccgcaggaaggcaagacccgcttccacgacttcaacctcgccccgagcctgatgcacgccatccatgacctcggcttcccctactgcacgccgatccaggcgcaagtactgggcttcaccctgcgcggccaggacgccatcggccgcgcccagaccggcaccggcaagaccgccgcgttcctcatctcgatcatcacccagttgctgcagaccccgccgccgaaagagcgctacatgggcgagccgcgcgcgctgatcatcgccccgacccgcgaactggtggtacagatcgccaaggacgccgcggcgctgaccaagtacaccgggctgaacgtgatgaccttcgtcggcggcatggacttcgacaagcaactcaagcagctggaagcgcgcttctgcgacatcctggtagccactccaggccgtctgctggacttcaaccagcgcggcgaggtgcacctggacatggtcgaggtgatggtcctcgacgaagccgaccgcatgctcgacatgggcttcatcccgcaggtccggcagatcatccggcagaccccgcacaagggcgaacgccagaccctgctgttctcggcgaccttcaccgacgacgtgatgaacctcgccaagcagtggaccgtcgatccggcgatcgtcgagatcgagccggagaacgtcgccagcgacaccgtcgagcagcatgtctacgccgtggccggcagcgacaagtacaagctgctgtacaacctggtggcgcagaacaactgggaacgggtgatggtcttcgccaaccgcaaggacgaagtccgccgcatcgaggaacgcctgaccaaggacggcatcagcgccgcccagatgtccggcgacgtgccgcagcacaagcgcatccgcaccctggaaggcttccgcgaaggcaagatccgcgtcctggtggcaaccgacgtggccggccgcggcatccacatcgacggcatcagccatgtgatcaacttcaccctgccggaagacccggacgactacgtgcaccgtatcggtcgtaccggccgcgccggcgcctcgggcacctcgatcagcttcgccggcgaggacgatgccttcgccctgccgccgatcgaagaactgctgggccgcaagatcacctgcgagatgccgccggccgaactgctcaagccggtaccgcgcaagcactga

SEQ ID NO: 779 - DNA, 76 bp, Pseudomonas aeruginosa
ttccgcgatagctcagtcggtagagcaaatgactgttaatcattgggtccctggttcgagtccaggtcgcggagcc

SEQ ID NO: 780 - DNA, 531 bp, Pseudomonas aeruginosa
atgtccatccgccgctattccccgtcacagatcgccctgcactggctcagcgccgtcgcggtcctgctgatcatcgccctgccctacggcgccgacttcttcgccggcctgctcggcggcaagggcaacgtcttcaccctgcacaagtcgctgggcgtggcggtactcctgctgaccctgacacgcctggcgctgcgccgcatccagggtgtcccggataccctggaggggaacccggactggcagcgcgcggccgccaaggccgggcatttcctgctgtacgcggtgctgatcgtcatgccgctctccggcatgctcgccggcaagcgtccgctggacctgttctggctggtgcagatcggcccgttcgacctgccggaagccgtcaaggcgttcgccggcggcacccacgtcaccgtccagtacctgcttttcgcgctgatcctcggccacgccgccgcggccatctggcaccaccgcgtgcagaaggacgacgtactgcgcgccatgctgccgcaacgcggcgcctga

SEQ ID NO: 781 - DNA, 255 bp, Pseudomonas aeruginosa
gtgcgcatgcacgatccgttcgaagagtccctgcgggacctgctcaaggcttcggctccccagccggacgacgacgcgcgtctgggacgggtgctgaagaccgccaatcgccaggtcggcgccggtgacctgttcagcctcatggggcactggctgcaggcgctgatgatcggcatcaacaacggttcgccgcatctggcgccggtttcccgtatttccgcgaaaaacgcatcttctgctgacaaggctgagtga

SEQ ID NO: 782 - DNA, 1524 bp, Pseudomonas aeruginosa
atggccgtgatcaagcaagacgacctgatccagagcgtcgccgatgccctgcagttcatctcctactaccacccggtcgatttcatccaggccatgcatgaggcctacctgcgcgaagaatcgccggctgcccgcgactccatggcgcagatcctgatcaactcgcgcatgtgcgccaccggccaccgcccgatctgccaggacaccgggatcgtcaccgtgttcgtccgggtcggcatggacgtgcgctgggacggcgctaccatgagcgtcgacgatatgatcaacgaaggcgtgcgtcgcgcctacaacctgccggagaacgtcctgcgcgcctcgatcctggccgacccggccggcgcgcggaagaacaccaaggacaacacgccggcggtgatccactactccatcgttcccggcgacaaggtcgaagtcgatgtcgcggccaagggcggcggctcggagaacaagtcgaagatggccatgctcaacccgtccgactcgatcgtcgactgggtgctgaaaaccgtaccgaccatgggcgccggctggtgcccgccgggcatgctcggcatcggcatcggcggcaccgcggagaaagcagcggtgatggcgaaggaagtcctcatggacccgatcgacatccacgaactgaaggcccgcggcccgcagaaccgcatcgaggaactgcgcctggagctgttcgagaaggtcaaccagttgggcatcggtgcccagggcctgggcggcctgaccaccgtgctcgacgtcaagatcatggactacccgacccacgccgcctcgctgccggtgtgcatgatccccaactgcgccgcgacccgccacgcccacttcgtgctcgacggctccggccccgccgaactggaagcgccgtcgctcgacgcctacccggagatcgtctgggaagccggcccgtccgcgcgccgcgtcgacctggacaagatcaccccggaagaggtgcaaagctggaaaccgggcgagaccctgctgctcaacggcaagatgctcaccggccgcgacgccgcgcacaagcgcatggtcgacatgctgaacaagggcgaaacgctgccggtggacctgaaaggccgcttcatctattacgtcggcccggtcgatccggtcggcgacgaggtggtcggcccggccggtcccaccaccgccacccggatggacaagttcacccgccagatcctcgaacagaccggcctgctgggcatgatcggcaagtccgagcgcggtcccatcgccatcgaggcgatcaaggacaacaaggcggtatacctgatggccgtcggcggcgccgcctacctggtcgcccaggcgatcaagaagtccaaggtgctggccttcgccgaactgggcatggaagcgatctacgagttcgaggtaaaggacatgccggtcaccgtcgcggttgacaccaacggcgagtcggtgcacatcaccggcccagcggtctggcagaagaagatcgccgaaagcctggcggtcgaggtcaagtaa

SEQ ID NO: 783 - DNA, 354 bp, Pseudomonas aeruginosa
atgtccaaacttgccgagttccgcgaggcagagcgcaaacttcaggagcaactggccctgctggaaaagctgaaaagcgacagcagcctgaagcaggaactggaattcaaggacaagttgcaggcgttgatggacaagtacggcatgaccctgcacaacatcatcgccatcctcgaccccaaggctccggtcaccgtcagcgccgctccgcagcgccgtgcccgcgccctgaaggtctacaagaacccgaacaacggtgaagtcgtcgaaaccaagggcggcaaccacaaggttctgaaagcctggaaagaacagtacggttccgaaaccgtcgaatcctggctgcaacgctaa

SEQ ID NO: 784 - DNA, 765 bp, Pseudomonas aeruginosa
tcagccccccaacacgcggcgaacgcgttcgaggtcttccggcgtatccacgcccggaagcatgttttcgcgggcatcggccacatggattcgcaccccgtgccagagcgcgcgcaattgctcaaggctttcggcgttctccagccagcacggtccccaggcgacgaaatcggcaaggaaacccacgcgataggcgtagatgccgatgtggcgacgatagggcacgccctccggcaggctgtcgcgatcgcgggcgaaggcgtcgcgagcccagggcaagggcgcacgactgaaagtcagggccaggccgtcgatgtcggtggcgaccttgaccacgttcggattgaacagcgcggagacctcatggatcggctcggccagggtagcgatggcagcttccgggtgcgccgccaggttggccgccacctggtcgatgagcgccggggggatcagcggttcgtcgccctggacgttgaccacgatggcatcgctggccaggccgagccgggaagcgacttcctccaggcgatcggtgccggagttgtgctcggcacgcgtcagcagcgcctcggcgccgaacccctggcacgccgccaggatgcgttcgtcgtcggtggcgacgaccacgcggctggcggcgctcttgcgggcctggttccagacgcgctggatcattggctggccggcgatatcctgcaatggcttgccgggcaggcgagtggaggcgtagcgggcgggaatgacgacagtgaacgcctgggtcat

SEQ ID NO: 785 - DNA, 645 bp, Pseudomonas aeruginosa
tcagtgtggcgcacgatacaggtggtgcgcctcgatgtagttcaataccgcgtccggcaccaggaaacgcacggagcgcccggcacccagcagcgcgcggatctgggtggcggacaccgccagcggcgtctgccagacgaaggtgatctgtccgcccggccctttcagggcctgcgggtcggccacgctccgcgccgccagcaggtcgcgcagcgactccggcggctcgctgtcggcatccggacgctgcaacacgacgatgtggcagtgatccagcaacgcctcccagcggtgccacgtcggcaagccgcagaaggcatcccagccgatcagcatgaacaactggtcgtcggccgccagttccgcccgcaccgactccagggtgtcgatggtgtaggacggcttgtcgcgctgcagttcgcggggatcgaccgtcaatcgctcgactcccgccaccgcccgctcgaccatcgccaaccgctgcgcggccgacacctgcggggtttcccggtgcggcggccgcgcattgggcagcaggcgcagttcgtcgagggcgaactgctcggccatttccacggcgctgcgcatatgtccgatatgcacggggtcgaaagtgccgccgaacaggccgatacgtttgcccat

SEQ ID NO: 786 - DNA, 474 bp, Pseudomonas aeruginosa
tcaggcgccgttgagcgcctgggcggcggcgagaaccgcgtcgacatgcccgggcaccttcacgccgcgccactcctggcgcagtacgccgtccctgtcgatcaggaaggtgctgcggtcgacgcccatgtattccttgccgtagagcttcttcagcttgatcacgtcgaacagttggcagaccgcttcatccttgtcgctgatcagctcgaaggggaattcctgtttgcacttgaagttctcgtgggacttcaggccgtcgcgggagatgccgaagacctcggtattggccttctggaacgccgcgtactggtcgcggaagccctggccctcggtggtgcaaccgggggtgctgtccttcgggtagaagtacaggacgacctgcttgcccttcaacgcggacagggtcacctccttgccgctggttgcgggggcggtgaagtcgggtacgggtttgtcgattgcgaccggcat

SEQ ID NO: 787 - DNA, 369 bp, Pseudomonas aeruginosa
ttacttgagctcgactttggcgcctgcttcttccagggctttcttggcggcttcggcttcttctttcgaagcgccttccttcaccacgcccggagcgccgtctacgacggccttggcttctttcagacccagaccggtcagttcgcgaacgaccttgatcacgttcactttcttgtcgccagcttcggccaggacgatggtgaactcggtctgctcttcggcagcggcagcagccgggccagcagcggcaacggtagcggcagcagcggtaacgccgaacttctcttccatcgccttgatcagttcgaccacttgcatgacggacatttcggatacggcgttgatgatgtcttcgttggtcagagccat

SEQ ID NO: 788 - DNA, 567 bp, Pseudomonas aeruginosa
tcaggcttttggcagggtcacgccgcgctggccctggtatttgccgccacggtccttataggacacttcgcaggcctcgtcggattgcaggaagagcatctgcgccacgccttcattggcgtagatcttcgccggcaggttggtggtattggagaactcgagggtcacatggccttcccactccggctccagcggggtgacgttgacgatgatgccgcaacgcgcgtaggtgctcttgcccaggcagatggtcaggacgtcgcgcgggatgcggaagtactcgacggtgcgcgccagggcgaaggagttcggcgggatgatgcagacgtcgctgttgatgtcgacgaagcttttctcgtcgaagttcttcggatcgaccaccgccgaatggatgttggtgaacaccttgaattcggcggcgcagcgcacgtcgtagccgtagctggacaccccgtaggaaatcacccggctgtcgtccgcgccgcgcacctggcgctcgacgaacggctcgatcatgccgtgctcctgagccatgcggcgaatccacttgtccgatttgatggtcat

SEQ ID NO: 789 - DNA, 1011 bp, Pseudomonas aeruginosa
atgcttagtttcattgctcgacgactggggctgctgatccccaccttcttcggcgtgaccctgctcaccttcgcgctgatccgcctgattcccggcgacccggtggaagtgatgatgggcgagcgccgcgtcgacccgcagatgcacgccgaggccctgcaccgcctgggcctggacaagccgctgtaccagcagtacctggactatgtcggcaacctcgcccagggcaaccttggaaaatccatacgcacacatgagcctgtctggaatgagtttctcacgctattttcagccaccctggaactttcattcgcagcaatgctttttgccggcacactcggcctcctagcaggagtggtagccgcactcaagcgaggttcgatttttgaccacggagtaatgacaatatctctagcgggctactcaatgccgattttttggtggggcctgctcttgatcatgctcttttccgtttcattaggctggactcctgtttctgaccgtatcggcgtgctgtatgaggtggagccgaagaccggcttcatgctcatcgacaccctgctctccgacgaggaaggcgcgttcctcgacgccgtgcgccacctgatcctgccggccatcgtgctgggcaccatcccgctggcggtgatcgcccgcatgacccgctcggcgatgctcgaggtcctgcgcgaggactacgtgcgcaccgcccgcgccaagggcttgtcgccggcccgggtggtcttcgtgcacgccctgcgcaacgcgctgatcccggtgctgacggtgttaggcctgcaggtcggcaccctgctcgccggcgcggtgctgaccgagaccatcttctcctggccgggcatcggcaagtggctgatcgacgccatcagcgctcgcgactacccggtggtgcagaacggcatcctgctggtcgccaccctggtcatcctggtcaatttcgtcgtggacatcctctacggcctggccaacccacgcattcgccaccaacgctga

SEQ ID NO: 790 - DNA, 1410 bp, Pseudomonas aeruginosa
atgtcgtacaagtcgcaccaactgatcaaagaccatgacgtgaagtgggtagacctgcgcttcaccgataccaagggcaagcagcaacacgtcaccatgccggctcgcgacgcgctggacgatgagttcttcgaagccggcaagatgttcgacggctcctccatcgccggctggaaaggcatcgaagcctccgacatgatcctgatgccggacgacagcaccgccgtcctcgatccgttcaccgaagagccgaccctgatcctggtctgcgacatcatcgagccgagcaccatgcaaggctacgagcgcgacccgcgcaacatcgccaagcgcgccgaggagtacctgaagtccaccggcatcggcgacaccgtgttcgtcggcccggagccggagttcttcatcttcgacgaagtgaagttcaagtccgacatctccggctcgatgttcaagatcttctccgagcaggcttcctggaacaccgacgccgacatcgagtccggcaacaagggccatcgcccgggcgtgaagggcggctacttcccggtaccgccggtcgaccacgaccatgaaatccgcaccgccatgtgcaacgccctggaagaaatgggcctggtggtcgaagtccaccaccacgaagtggcaaccgccggccagaacgagatcggcgtgaagttcaacaccctggtcgccaaggccgacgaagtgcagaccctgaagtactgcgtgcacaacgtcgccgacgcctacggcaagaccgtgaccttcatgccgaagccgctgtacggcgacaacggttcgggcatgcacgtgcacatgtcgatctccaaggacggcaagaacaccttcgccggcgaaggctatgccggcctgtccgagaccgccctgtacttcatcggcggcatcatcaagcacggcaaggccctgaacggcttcaccaacccctcgaccaactcctacaagcgcctggtcccgggcttcgaagctccggtgatgctggcctactcggcgcgcaaccgttccgcctcgatccgtatcccctacgtatccagcccgaaggcccgccgtatcgaagcgcgcttcccggacccggcagccaacccctacctggccttcgccgcgctgctgatggccggcctggacggcatccagaacaagatccaccccggcgatgccgccgacaagaacctgtacgacctgccgccggaagaggcgaaggaaatcccgcaggtttgcggcagcctgaaagaggcgctggaagaactcgacaagggccgcgcgttcctgaccaagggcggcgtgttcaccgacgagttcatcgatgcctacatcgagctgaagagcgaagaagagatcaaggtgcgcaccttcgtgcacccgctggaatacgacctgtactacagcgtctga

SEQ ID NO: 791 - DNA, 1344 bp, Pseudomonas aeruginosa
atgtccatgacgccccgcgagatcgtccacgaactcaaccgccacatcatcggccaggacgacgccaagcgcgccgtcgccatcgccctgcgcaaccgctggcgacgcatgcaactgccggccgagctgcgcgccgaggtaacaccgaagaacatcctcatgatcggccccaccggcgtcggcaagaccgagatcgcccgccgcctggcgcgcctggcgaacgcgccgttcatcaaggtcgaggcgaccaagttcaccgaggtcggctatgtcggacgcgacgtcgaatcgatcatccgcgatctcgccgacgccgcggtgaagatgctccgcgaacaggagatccagaaggtcaagtatcgcgccgaggacgccgccgaagagcgcatcctcgatgccctgctgccggccgcgcgtcccgccatgggcttcggcgacgagccggcacgcgaggacagcaacacccgccagctgttccgcaagcgcctgcgcgaaggccagctggacgacaaggaaatcgacatcgaggtggccgacaacccggccggcgtggagatcatggccccgcccggcatggaggagatgaccaaccagttgcagaacctgttctccggcatgagcaagggcaagaagaagacccgcaagctgaaggtcgccgaggccctgaagctgatccgcgacgaagaggcggtgcgcctggtcaacgaggaagagctcaaggcacgcgccctggaggcggtcgagcagcacggcatcgtcttcatcgacgagatcgacaagatcgccaagcgcgccaacgccggcggcgccgacgtctcccgcgagggcgtacagcgcgacctgctgccgctgatcgagggctgcacggtgaacaccaagctgggcatggtcaagaccgaccacatcctgttcatcgcctccggcgccttccacctgagcaagccgagcgacctggttcccgagctgcagggccgcctgccgatccgcgtggagctcaaggccctcagtccgaacgatttcgagcgcatcctcaccgagccgcatgcctcgctcaccgagcagtaccgcgagctgctgaagaccgaggggctggccatcgagttcgccgaggacggcatcaagcgccttgccgagatcgcctggcaggtcaacgagaagaccgagaacatcggtgcccgccgcctgcatacgctgctcgagcggctgctggaagaggtctcgttcagcgccgccgacctggccagcgagcatagcgacaagccgatcctgatcgatgccggctacgtcaacagccacctcggcgagctggccgaggacgaggacctgtcccgctacatcctttga

SEQ ID NO: 792 - DNA, 1197 bp, Pseudomonas aeruginosa
tcaggcctggatcaggttggcgatctgcacgtccgggttgacgtcctgctcgtagtcgaccccagcgacctcgaaaccgaacaggttgaggaactcgctcttgtagccggcgaagtcggtcaattcgtaaaggttctcgttggttaccttgtcccacagctcctcgacacgggactgcacttccggctgcagttccttgtagtcggcacgcaggcggccttcctcgtcgaggcgcggctcggcgccgtacaggctctcccggtacaggccgtcgacctgctcgatgcaaccttcgtgggtaccctgctccttcatcaccttgaacagcagcgacaggtacagcggcatcatcgggatcgccgagctggcctgggtcaccaccgccttgagcaccgagacgcgcgcgtcgccgcccagcggggcgagcttgtcgcggataccgaggaccttctggtcgagatccttcttggctgcgccgatggaaccgttccagtagatgtcgtgggtgatcttctcgcccaggtaggtgaacgcggtggtcttcgcgccgtcggccagcacgtcggcctccagcagcgcgtcgatccacatctgccagtcctcgccgcccatcaccgcaacggtatcggcgacctcctggtcgctggccgcctccaggaccacgtccttgatcacttccttgtcggtgtccaggccacggaagctgaccgacttgccgatcggcttgagggtcgaggagaacacttcgccgctcttcggatgggtacggcgcggcgcggccaggctgtagaccaccaggtcgaccttgccgagatcgcgcttgatggtctcgatggtcagccgcttcacctcgtcggagaaagcgtcgccattgatgctgcgggcatacaggcctttctcgtgggcgaacttctcgaaggccgccgagttgtaccagccggcggtgcccggcttgctctcgctgcccggacgctcgaagaacaccccgagggtatcggcgccggaaccgaacgcggcggtgatgcgggcagccaggccatagccggtggaggaaccgatgaccaggaccttcttcggtccgttgacgacggggcccttggcctcgacgtagtcgatctgttgcttgacgttggcctcgcagcctgccggatgggtagtgacgcagatgaagccacgcacgcgcggtttgatgatcat

SEQ ID NO: 793 - DNA, 1218 bp, Pseudomonas aeruginosa
tcaaccctgccagcgcttgaggaccagggtggcgttggtgccgccgaagccgaagctgttgctcatgacggtatcgagcttggcgttctcgcgggtctcgcggagaatcggcaggtcggccacttccgggtcgagttcgtcgatgttggcggagccggcgatgaagccgccttccatcatcagcaggcaatagatcgcctcgtgtacgccggcggcgcccagcgagtggccggacaggctcttcgtcgagctgatggccggcgccttgtcgccgaacacttcgcgcacgcctcggatctcggcgacgtcgccgaccggggtggaggtgccgtgggtgttcaggtagtcgatcggcgcgtcgacggtggccagcgcctgctgcatgcagcggatcgcgccttcgccgctcggggcgaccatgtcgtagccgtcggaggtggcgccgtagccgacgatctcggcgtagatcttggcgccgcgcttgagcgcatgctccagcccctcgaccaccaccatgccgccgccgccggcgatgacgaagccgtcacgcttggcgtcgtaggcgcgggaggccttttccggcgtctcgttgtactgggtggagagggcgcccatggcgtcgaacaggcagctctggctccagtgttcctcttcgccgccgccggcgaagaccacgtcctgcttgcccagctggatttgttccatggcctggccgatgcaatgcgcgctggtggcgcaggcggaggagatcgagtagttgacgcccttgatctggaacggcgtggccaggcaggccgatacggtgctgcccatggtgcgggtcacgcggtatgggccgatgcgcttgacgcctttctcgcgcagggtatcgatggcttccatctggttcagggtggaagcgccgccggagccggcgatcaggccggtgcgggggttggaaatctgttccggagtcaggccggagtccttgatcgcctgctccatcgccaggtaggcgtaggcggcggcatcgcccatgaagcggaagaccttgcgatcgatcagctcttcgaggttcaggtcgaccgaaccggaaacgtggctgcgcaggcccatctcggcgtaggacggattgaagcgaatgccgggccgacccgcacggaggttggcggaaacggtgtctttgtcattgccgaggcaggaaacgatgcccagaccggtgataacgacgcgacgcat

SEQ ID NO: 794 - DNA, 1629 bp, Pseudomonas aeruginosa
tcaggccttcccggaatatttcagcgcggcgttgacgaaaccgctgaacagcgggtggccatcacgcggtgtggaggtgaactccgggtggaactggcaggcgacgaaccacggatgctccggggcctcgaccacttccaccagggcgccgtcgccggagcggccggaaatcttcaggccggcctgttccagttgcggcagcaggttgttgttcacttcgtagcgatggcgatggcgctcgacgatcacgtccttggcatagcagtcgtgcaccaaggtgccggtctgcagctggcactcctgggcgcccaggcgcatggtgccgcccaggtcggaagcttcggtgcggatctcggtggcgccggtcgcgtcctgccattcggtgatcaggccgaccaccggatggccgctggacttgtcgaactcggtggagttggcgtcgctccagccgagcacgttgcgggcgtattcgatgaccgcgacctgcatgcccaggcagatgcccaggtagggaatcttgttctcgcgggcgtactgcacggtgctgatcttgccttccacgccgcgcaggccgaagccgcccgggaccaggatggcgtcgacgccttccagcaggctggtgccctgctgctcgatgtcttcggagtcgatgtagcgcaggttgaccttggtgcggctctggatgccggcgtgggtcatcgcctcgatcagcgacttgtacgcgtccagcagttccatgtacttgccgaccatggcgatggtgacttcacgctcggggttgagcttggcatcgaccacccggtcccattcggacaggtcggcctgcccgcactccaggccgaagcgctcgacgacgatgtcgtctaggccctgggcatgcagcaccgacgggatgcggtagatggtgtcgacgtcttccagggcgatcaccgcgcgctcctcgacgttggtgaagagcgcgatcttgcgccgcgaggagacgtcgatcgggtggtcggaacggcagaccagcacgtccggttgcaggccgatggagcgcagctccttgaccgagtgctgggtcggcttggtcttggtctcgccggcggtggcgatgtacgggaccagggtcaggtgcatcagcatcgcgcgcttggcgccgatctcgacgcgcagttggcggatcgcctcgaggaacggctgcgactcgatgtcgccgacggtgccaccgatctccaccagggcgacgtcggcatcgccggcgcccttgatgatgcgccgcttgatctcgtcggtgatgtgcgggatcacctgcacggtggcgcccaggtagtcgccgcggcgttccttgcgcaacacgtccatgtagacgcggccggtggtgaagttgttgttctgggtcatggtggtacgaacgaagcgctcgtaatggcccaggtccaggtcggtctcggcgccgtcctgggtcacgaagacctcaccgtgctggaacgggctcatggtgcccgggtccacgttgatgtaagggtccagcttgagcatcgtgatcttcaggccacgcgcttccaagatcgcagccagagaagccgaagcgatgcctttccccaatgaagaaacaacaccacccgtgacgaagatgtagcgcgtcat

SEQ ID NO: 795 - DNA, 1425 bp, Pseudomonas aeruginosa
atgtcccccgttgcatcttcccgtatcgagaaagacctgctcggcaccctcgaagtgcccgctgacgcctactacggcatccagaccctgcgcgccgtgaacaacttccgcctctccggggtgccgctgtcgcactacccgaagctggtcgttgccctggccatggtcaagcaggccgccgccgacgccaaccgtcagctcggccatctcccggaagacaagcacgccgccatcagcgaggcctgcgcccgcctgatccgcggcgatttccacgagcagttcgtggtggacatgatccagggcggcgccggcacctccaccaacatgaacgcgaacgaagtgatcgcgaacatcgcgctggaagccatgggccacaccaagggtgagtacaagtacctgcacccgaacaacgatgtgaacatggcgcagtcgaccaacgacgcctacccaaccgccatccgcctgggcctgctgctcggccacgacaccctgctggccagcctcgacagcctgatccaggccttcgccgccaagggcgtcgaattcgccggcgtactgaagatgggccgcacccagttgcaggacgccgtgccgatgaccctcggccaggaattccacgctttcgccaccaccctcggcgaagacctcgaccgcctgcgtcgcctggcgccggagctgctcaccgaagtgaacctcggtggcaccgccatcggcaccggcatcaacgccgaccccggctaccagaagctcgccgtcgagcgcctggccgccatcagcgggcagccgctgaagccggccgccgacctgatcgaagccacctccgacatgggcgccttcgtgctgttctccggcatgctcaagcgcaccgcggtcaagctgtcgaagatctgcaacgacctgcgcctgctctccagcggcccgcgcaccggcatcaacgagatcaacctgccgccgcgccagccgggcagttcgatcatgccgggcaaggtcaacccggtgatcccggaagcggtcaaccaggtcgccttcgaagtgatcggcaacgacctcgccctgaccctggcggccgaaggcggccagttgcaactgaacgtgatggagccgctgatcgcctacaagatcttcgactcgatccgcctgctgcaacgcgccatggacatgctccgcgagcactgcatcaccggcatcaccgccaacgtcgagcgctgccacgaactggtcgagcacagcatcggtctggtcaccgcgctgaacccgtacatcggctacgagaactccacgcggatcgccaagaccgccctggagagcggccgcggcgtcctggaactggtacgcgaggaaaagctgctggacgaagccaccctggccgacatcctgctgccggaaaacatgatcgcgccgcgcctgattccgctgcgcgcctga

SEQ ID NO: 796 - DNA, 1392 bp, Pseudomonas aeruginosa
atgagcactgcaaaagcaccgacgctgcccgccagcatcttccgcgcctacgacatccgtggcgtggtaggcgataccctcaccgccgagaccgcctactggatcggtcgcgccatcggctcggaaagcctcgcccgcggcgaaccgtgcgtcgctgtcggccgcgatggccgcctgtccggtcccgagctggtcaagcagctgatccagggcctggtggactgcggttgccaggtcagcgacgtgggcatggtgcctaccccggtgctgtactacgcggccaacgtgctcgagggcaagtccggggtgatgctgaccggcagccacaacccgccggactacaacggcttcaagatcgtggtcgccggagagaccctggccaacgagcagatccaggccctgcgcgagcgcatcgagaaaaacgacctggcatccggcgtcggcagcgtagagcaggtcgacatcctgccgcgctacttcaagcagatccgcgacgacatcgccatggccaagccgatgaaggtggtggtcgactgcggcaacggcgtggccggggtgatcgccccgcagttgatcgaggccctgggctgcagcgtgatcccgctgtactgcgaggtcgacggcaacttcccgaaccaccatccggacccgggcaagccggagaacctgaaggacctgatcgccaaggtcaaggccgagaacgccgacctgggcctggccttcgacggcgacggcgatcgcgtcggcgtggtcaccaataccggtaccatcatctatccggaccgtctgctgatgctgttcgccaaggacgtggtctcgcgcaacccgggggccgacatcatcttcgacgtcaagtgcacccgccgtctgatcgccctgatcagcggctacggcggccgtccggtgatgtggaagaccggccactcgctgatcaagaagaagatgaaggaaaccggcgccctgctggctggcgagatgagcggccacgtgttcttcaaggagcgctggttcggcttcgacgatggcatctacagcgccgcccgcctgctggaaatcctcagccaggatcagcgtgacagcgagcacgtgttctcggccttcccgagcgacatttccaccccggaaatcaacatcaccgtcaccgaggacagcaagttcgccatcatcgaggcgctgcaacgcgacgcccaatggggcgaaggcaacatcaccaccctcgacggcgtgcgggtcgactaccccaaaggctggggcctggtacgcgcctccaacaccactcccgtgctggtcctgcgcttcgaagcggacaccgaggaagagctggagcgcatcaagaccgtcttccgtaaccaactgaaggcagtggattcctcgctgcccgtgcccttctga

SEQ ID NO: 797 - DNA, 1071 bp, Pseudomonas aeruginosa
tcagagcaggtcacgctggcgcaaatgctggcggatctcgttggcccgggagccaaggaggttgcgcagcaagctgtgattcagccaatcctcgatttgttccgcaatcggttcctgcggatagcgttcgatggcattggtcgcggctttctcccaccagacggggccgcaggcccggtcgaactcgttactgtattcgtggcaaccgtagagcagttcgatactgaactggcgcatcggagccggcaacggcagggttcccagcttgtacagcagacgcttggcacgcggtgggcgtggcagtcgatcggtcaccttgagggtgtcgtcgagggctgcagcgctgagaagggaggaaccgtgcttgcacaaccaggcctggatcttcgcgcggaacagctgtttccggctccagtaatggtggatcaggtcggtacaacccaccagctccagccgcttgtgggcggcgacggccaggacgaattcctcaagagtataggcaccgttggcaattggatagagttcatccattaattccaacgaacggtcgagtattttcgcctcttcccgaggcaggccgatgacgccggagttgagctggtgcatctcgtcgtcggcccagccgcgctcgaacaggtagggcgagaggtcgcggtagagcgggaagttacggtgttcgccatagcgcgcgccgatcgcgttgcacagcaggctgccgggctggatgcggtcgaacaggcgcaggggcgaactgtggaagaaggtatcggtgtcgatcagcaacgcctggtcggcctcttccagggcgtcgcgcagggccacgtgcttggcgcggaagtgatagccgtgcggttggcaccaggcgaccaactcctcggccgtcacttcgcggacctgcaccggcaggccggcgtagggactggggtcgtcggtatagaccctgaccgtcaggccatgcgccgccccgtcgcggaggtgggcgaaggcgctggcgatgctgaacagggcttcctggtggtaggtctgtcgcccgtagaccaggtagatcagatgcttgcgtgagttggccat

SEQ ID NO: 798 - DNA, 279 bp, Pseudomonas aeruginosa
atgagcagctcacgcaacctggtcggcaccggacttctttccctgctggctctcgtagtcttccagaacagcgcactgggcgacgaggacaggacgcaggaacgcaacggcgaaaggccggtagtgctggacagcaacgcaacgccgcagtgggcacccgctgcgcaacaactggtgatccaggcgcccgacgaatccccgcgcatcgtcaccgtaggcgaggacgagcgcggcacggcgctggtgaccgcggccgacgaacaggcctggacattctga

SEQ ID NO: 799 - DNA, 510 bp, Pseudomonas aeruginosa
tcagccatgggcggcttctccggatttcttcgatctgaacatgtcgagcgccagcatgacggcgccgacggtgatggcgctatcggccaggttgaacgccgggaagtaccagcggttctgccagtgcaccaggatgaagtccaccacgtggccaaggaccatgcggtcgtagaggttgcccagggcgccgccgagcaccagcgccagggcgatggccaaccaggtctcgcctttcttcaggcgtttcagccagaccaccaggctcgcgctgacgacgatggcgatcagggcgaacagccagcgctgccagcccgagctgtcggccaggaagctgaaggcggcaccggtgttgtaggccagggtccagctgaacagatcggggatcaccacgatctgctggtacatgctcagttcggcctggaagaacgccttgctgacctggtcgaggacgaacaccagcacggtgatccacaaccagggcaagcgcccgaaacgatcgacgtcaggcat

SEQ ID NO: 800 - DNA, 408 bp, Pseudomonas aeruginosa
atgactggatacggcagcctgttcgagcgcctgaacggcgacgcggataagcgcgtcggctggagccgcgaggtttccgccatggcgtcggtggctgcccatctgggcaagatgctcagcacccgggcgggcagcgtgcagacgctgtccgactacgggttgcccgatctcaacgacatgcgcctgagcctgcacgactccctgagccaggcccgctcggccatcgaaggtttcatcgaggcttacgaaccgcgcttgagcgacgtgcgtgtcgtttccctgccacgcgacaacgaccagctccgcctggccttcagcatcgaagggttgctggaggtggaaggtttcaagcgccaggtgagtttttccgcatgcctggatggcagcggccaggtgaaggtcagctaa

SEQ ID NO: 801 - DNA, 813 bp, Pseudomonas aeruginosa
atgcccgaactacccgaagtcgaaaccacccgccggggcatcgccccctacctcgaaggccagcgcgtcgagcgcgtgatcgtgcgcgagcggcgcctgcgctggccgattcccgaagacctggacgtgcgcctgtccggacaacgcatcgtcagcgtcgagcgccgcgccaagtacctgctgctgggcgccgaggccggtacgctgatcagccacctgggcatgtccggcagcctgaggctggtggagagcggcaccccggccagtcgccacgagcacgtcgacatcgagctggcctcgggcatggccctgcgctacaccgatccgcggcgcttcggcgccatgctctggagcctggcgccactggaacacgagttgctgcgcaacctcggcccggaaccgctgaccgacgctttcgccggccagcgtctgttcgagctgtcgcgcgggcggagcatggcggtcaagccgttcatcatggacaacgcggtggtggtcggggtcggcaacatctacgccagcgaagcgctgttcgccgccggcatcgatccgcgcaagcccgccgggagcatctccaaggcgcgctacctgcgcctggcggaggagatcaagcggatcctggcgatcgccatcgagcgcggcggcaccaccctgcgcgatttcgtcggcggcgacggccagcccggttacttccagcaggaattgttcgtctatggccgtggcggggagttctgcaaggtctgcggcagcaccctgcgcgagatccgcctaggccagcgcgccagcgtgtactgcccgcgctgccaacgctga

SEQ ID NO: 802 - DNA, 771 bp, Pseudomonas aeruginosa
atgaacgatccccgcaaaggcgccgacgccgaacccaccacccacttcggctaccagaacgttccggaaagccagaaggcgaagaaggtcgccgaggtatttcactcggtggcagccaagtacgacctgatgaacgacctgatgtccggtggcatccatcgcctgtggaagcgcttcaccatcgagctgtccggcgtgcgcagcgggaaccgcgtgctcgacatcgccggcggcaccggcgacctgacccggcagttctcgcgcctggtcggcccgaccggcgaggtggtgctggccgacatcaacgcctcgatgctcaaggtcggccgcgacaagctgctcgacaagggcgtctccggcaacgtcagcttcgtccaggcggacgccgagaagctgcccttcccggacaaccacttcgactgcgtgaccatcgccttcggcctgcgcaacgtcacccacaaggacgaagcgatccgctccatgctgcgcgtgctcaagcccggtggccgcctgctggtgctggagttctccaagccgagcagcaacctgctgtccaaggcctacgacgcctattcgttcagcctgctgccgctgatgggcaagctggtcaccaacgactccgagagctatcgctacctggccgagtcgatccgcatgcaccccgaccaggaaaccctgaaggcgatgatggtggaagccggcttcgaccgcgtgacctaccacaacatgaccggcggcatcgtcgccctgcaccgcggtatcaagccttaa

SEQ ID NO: 803 - DNA, 1065 bp, Pseudomonas aeruginosa
atggcactcatcagcatgcgccagatgctggatcacgccgccgaattcggctacggcgtgccggccttcaacgtcaacaacctcgagcagatgcgcgccatcatggaagcggcggacaagaccgattcgcccgtgatcgtccaggcttccgccggtgctcgcaaatacgccggcgcgcccttcctgcgccacctgatcctcgccgcgatcgaagaattcccgcacatcccggtggtcatgcaccaggatcacggcaccagtcccgacgtctgccagcgttccatccagctgggcttcagctcggtgatgatggacggctccctgcgtgaagacggcaagacccctgccgactacgactacaacgtccgtgtgacccagcagaccgtggcgttcgcccatgcctgcggcgtgtccgtggaaggcgagctgggctgcctgggttccctggaaaccggcatggccggcgaggaagacggcgtcggcgcggaaggcgtgctggaccacagccagttgctgaccgatccggaagaagccgccgacttcgtgaagaagaccaaggtcgacgccctggccatcgccatcggcaccagccacggcgcctacaagttcaccaagccgccgaccggggacaccctgtcgatccagcgcatcaaggaaatccacgcgcgcatcccggacacccacctggtgatgcacggctcttcctcggtaccgcaggactggctggcgatcatcaacgagtacggcggcgagatcaaagagacctacggcgtgccggtcgaggaaatcgtcgagggcatcaagtacggcgtgcgcaaggtgaacatcgacaccgacctgcgcctggcctccaccggtgccatccgccgcttcctggcgcagaacccgagcgagttcgacccgcgcaagtacttctccaagaccgtcgaggccatgcgcgacatctgcatcgctcgctacgaagccttcggcaccgccggcaacgcttccaagatcaagccgatctccctggaaggcatgttccagcgctacgctcgcggcgagctggatccgaaggtcaactaa

SEQ ID NO: 804 - DNA, 312 bp, Pseudomonas aeruginosa
atgaccgcagccaacctcaccgaacagcaacgcctggaactcgaagccgccgccttccgcaccctggtccatcatttgcagacccgcaaggacgtgcagaacatcgacctgatgaacctcgccggtttctgccgcaactgcctgtccaagtggtacaaggccgccgccgacgacctcggggtggaagtcagcaatgaccaggcccgcgaagagatctacggcatgccctatgccgagtggaaagccaagtaccagaaagaagcgagcccggaacaacaggccgccttcgccaagagccagggcaacgcctga

SEQ ID NO: 805 - DNA, 558 bp, Pseudomonas aeruginosa
tcaggggtgttgggggcgccagggttcgatcagggcatccaggttcagggcgtcggcgaagtccaggaactggtcgcgcagccaactgatctgggtgccggcgggcagcgtcacggtaatcgtggcgttgagcatggtggtgttggtgtgcggcgcctggtaggtgtcgcaggtcaggttctccagctcgatgttgtggtcgatgaagaactggcagagttcgttgaggatgtccgggcgatacaccgcgctgacataggccacgtaaggcaacgcctgggcgcgggtcacgtgggcgttgctgcgggtcatgctgagggtgatgtcgccgcgcttggtgagggccggcaggctgccctcgaggcgggcgagggcatcccagcttccggagatctgcagcaccagggcgctgaactctccgtggcgggtcaggcggctgctgaccacggcgcagcggctctcgacgcaggcgcggcagagcagggtggtcagctccatcggattggggccgagggcgctgatcagaaggaattgttcgcggggttggctggtggacat

SEQ ID NO: 806 - DNA, 879 bp, Pseudomonas aeruginosa
atgattgcgggcagtatggtggcactggtcacccccttcgatgctcagggtcgactggactgggacagcctcgccaagctggtggacttccacttgcaggaaggcaccaacgccatcgtcgccgtcggcaccaccggtgaatcggccacgctggacgtggaagagcacatccaggtgatccgtcgcgtggtcgaccaggttaagggccgcatcccggtgatcgccggcaccggcgccaactccacccgcgaggcggtggcgctgaccgaggccgcgaaaagcggcggcgccgacgcctgcctgctggtgacgccgtactacaacaagccgacccaggaaggcatgtaccagcacttccgccatatcgccgaagccgttgcgatcccgcagatcctctacaacgtaccgggccgcacctcctgcgacatgcttccggagaccgtcgagcgcctgtccaaggtgccgaacatcatcggcatcaaggaggccaccggcgacctgcaacgcgccaaggaagtcatcgagcgcgtcggcaaggacttcctcgtctattccggcgacgacgccacggccgtcgagctgatgctgctgggtggcaagggcaacatctcggtgaccgccaacgtcgcgccgcgcgccatgagcgacctgtgcgccgccgccatgcgcggcgacgccgcagccgcgcgcgccatcaacgatcgcctgatgccgctgcacaaggcgctgttcatcgaatccaaccccattccggtgaagtgggccctgcatgagatgggtctgatccccgagggcatccgcctgcccctgacctggctcagcccgcgttgccacgagccgctgcgtcaggccatgcgccagaccggcgtattggcttga

SEQ ID NO: 807 - DNA, 1068 bp, Pseudomonas aeruginosa
tcagtatgcgcatgggttttccgtctgccctgtcggtaccaggtcgaggatttcacgcaccactacggtggcgaaacaaccggccggcaggacgaattccagttgcagaacatcaggttcgggataatgccacgccagcccctggatggggagccgcaggatgcgccgttcgtgcgccatgcccgccttcgccagccagcggcagagcgccggctcgcgcccggccagggccagctcgcggtcgaggacgccggcgccgctcggcggatcgccctcgccccagagcggtccggtggggtgcaggtcgagggcggccagacgggcatcgcggcattcttcctcgccagcgaggaaaaagctgcggctgtcggtgaaggccagcaggtcaccgaccgctgcccggttccagctaccctccgcgacccgctcggcgagcaggcgattgaacaggtagctgcgcccggcggaaaggaagcgcgaacgcaggttgcggttcgccggcagcaggtcctgttccgcgcaactgcgcgcgtcgaccaggttgccgccgccgtggccgaagcgttgcaggccgaaataattgggcacgccgtccgcggcgatacgttccaagcgcgcgtcgagaggggcacgctccgcccgcagcccggtcagacgcagggtgaaaccgttggcggcatgcgcgcctcgctgcaacttgcgcgaatgacgggtgcagcgaagaatccgcaggtccgcgccctcggctgcacccaggtcgggatcggccttgcccggcaggtgcaggctgaaccattgccgggtcagggcctggcggtccttcaacccggcgtagctgacgttcttctgctgcacgccggcggcgcggccgaggcgacgggccgcctcctcggtgttcaatccgcgcttttccacccacaaccagaggtgctcgccttcaccgctgaggggaatttccagcacctcgtcgacctggaagtcctcggccacggccttgagcaccgcctcgccgcaggctgccccatgggcgcgcggcccgagcaggtcgagttcgccgagaacgctcat

SEQ ID NO: 808 - DNA, 789 bp, Pseudomonas aeruginosa
atgaaagtctgggcagtcgccaatcagaaaggaggggtcggcaagaccacctcgtccatcgccctggccggcctgttggcggatgccggcaagcgcgtggtcgtggtcgacctggacccccacggctcgatgaccagctatttcggctatgacccggacaccctcgagcacagcgccttcgacctgttcctgcaccagggcaacgtccccgaggggctgccggcctcgctgctgcgcagcaccagcaacgaacgcatttccctgctgccgtcgagtaccgcgctggccaccctggagcgccagtcgccgggcaagagcggtctcggcctggtggtctcgaagagcctggcgcagctctggcaggatttcgaccatgcgatcatcgacagcccgccgctgctcggcgtgctgatggtcaacgccctggccgccagccagcacctggtgatcccggtgcagaccgagttcctcgcggtgaaagggctggagcggatggtcaacaccctggcgatgatcaaccggtcgcgcaaacaggcgttgccctataccatcgtacctacgctgttcgaccggcggacccaggcttcgctgagcacgctgcggattctcaacgagaactacccggacaacctgtggcaggcgttcattcccatcgatacccgcctgcgcgatgccagccgggccggggtcacgccgtcgcagcacgacggcaagagtcgcggggtgatcgcctaccgcgccttgctcaagcatctgctggcgcagcagccggccacccgggtggcctga

SEQ ID NO: 809 - DNA, 312 bp, Pseudomonas aeruginosa
ttagccgaggctgatctgtacttcaacgcctgcagcaagatcgagcttcatcagcgcatcgacggttttatccgtcggctggacgatgtccagtacacgcttatgtgtacgaatttcgtactgatcacgcgcatctttgttgacgtgcggagagatcagcacggtgaaacgttccttgcgggtcggcagagggattggaccacgcacctgagcaccagtacgtttcgcggtttccacgatttcctgggttgattgatcgatcaggcgatggtcaaaagccttcaaccgaatccggatttgttggttttgcat

SEQ ID NO: 810 - DNA, 1578 bp, Pseudomonas aeruginosa
ttattcatcggcaggcagctgatagctccaggtttcgctcagtggcttctgcgcctcgtcgaccagcgccgcgcgcatttccaccggcttcttcggatccttgaccttgatccgcagcgtcaggcgccagcctttcaggaccgggttgtaacgcaggctgttctccaccacctcggcgttgctgtcggtgctgacctgggtggtcaccggcgcgtccggcgccaggtccttcagggccggcccttcgaagtcgacgaccagggcggtgctgccgtcctgctggcggatcaggttcttctgcttcacgtcgccgaccgagcgcatggtctgcttgacccaggaggatttcgggtcgtgcagctcgtcttcatccatggtccagtgcaggcggtaggcgaagtccagcggctttccgacctcaggctgggtctcggggttccagaacgcgacgatattgtcgttggtttcgtccggggtcgggatttccaccagttccacggtgcccttgccccagtcgcccttcggctcgatccaggcactcggacgcaggtcgtagcggtcatccaggtcttcgtagcgggagaactcgcggccgcgctggagcaggccgaagcctttcgggttctccacgctgaaggtgctcaccgacaggtgcttcggattgttcagcggacgccacagccactcgccgttgccggcatggatctgcaggccgctggagtcatgcagctcgggccggaagttgtgctgctcggacggctggttggagccgaacaggtacatgctggtcagcggcgccaggcccagcttgctgaccttgtcgcggaggaacacgcgggcctggacatccatcaccgcatccttgcccggacgcagcacgaagcggtaggcgccggtggcccgcggcgagtcgagcagggcgtagatcaccagttgcttgtcctgcgccttcggccgctcgatccagaattcgcggaagcgcgggaactcttcgcccgaaggcagcgcggtatcgatcgccaggccgcgcgccgacagaccgtagacctggcccttgccgaccacgcggaagtagctcgcgccaaggaaggtggcgatctcgtcctgcttgtcggccttgttgatcggatagagcacgcggaaaccggcatagccgagatccttggtggcattctcgtcgaacttcagggatccgaaatcgaacttggtgcgatcgtacttgatcggcttgaccgtggtagcggtcacctcgttgatcttcaccggcgtgtcgaagtgcatgccctggtgatagaagctcagcttgaacggcgtcttcagcttgccccagtaggcgcgctcgttgatgaaacggatctgctggtaatcggcgaatttcatttcgctgaattccgatggcaggttgctggtcggcgcggaatacttgtcgccggccaggtccttggccttgctcgccacgtcgtcgatgctgaacgcccataccggggcggcgacgaatgccagcgcggtcgagccggcaagcagcagggtgcgcacgcgggcgcggaaatcggtgtttgaaacggaacggaaaatcac

SEQ ID NO: 811 - DNA, 1425 bp, Pseudomonas aeruginosa
atgcataccctaaaacgctgtatggctgcgatggtggccttgctggccttgagcctggcgatgacggcccgggcagaactgccggacttcacgcctttggtcgaacaggcgtcgccggcggtggtgaatatcagtacgcggcagaagctgccggatcgcgccatggcgcgcgggcagctgtcgatccccgacctcgaagggctgccgccgatgttccgcgacttcctcgagcgcagcatcccgcaggttccgcgcaatccgcgcgggcagcagcgcgaggcgcaatcgctgggttccggcttcatcatctccaacgacggctacatcctcaccaacaatcacgtcgtggccgatgccgacgagatcctggtgcgcctgtccgaccgtagcgagcacaaggccaagttgatcggcgcggacccgcgcagcgacgtggcggtgctgaagatcgaggcgaagaacctgccgaccctgaaactgggcgattcgaacaagctgaaagtgggcgaatgggtcctggccatcggttcgccgttcggcttcgatcactcggtcaccgccggtatcgtcagtgccaagggtcgtagcctgccgaacgagagctacgtacccttcatccagaccgacgtggcgatcaacccgggtaactccggcggtccgctgctgaacctgcagggcgaagtggtcggcatcaactcgcagatcttcacccgttccggcggcttcatgggcctgtccttcgccattccgatcgatgtcgcgctgaacgtcgccgaccagttgaagaaagccggcaaggtcagtcgcggctggctgggcgtggtgatccaggaagtgaacaaggatctcgccgagtccttcggcctcgacaagccgtccggcgcgctggtggcgcaactggtggaagacggcccggcggccaagggtggcctgcaggtgggcgatgtgatcctcagcctgaacggccagtcgatcaacgagtccgccgacctgccgcacctggtgggcaacatgaagccgggcgacaagatcaacctggacgtgattcgcaacggccagcgcaagtccctgagcatggcggtaggcagccttccggacgacgacgaggaaatcgcctcgatgggcgctccgggcgccgagcgcagcagcaaccgcctgggcgtgaccgtcgccgacctgaccgccgagcagcgcaagagcctggatatccagggcggcgtggtgatcaaggaagtccaggacggtccggccgcggtcatcggcctgcgtccgggcgatgtcatcacccacctggacaacaaggcggtgacctcgaccaaggtcttcgccgacgtggccaaggccctgccgaagaaccgttcggtttcgatgcgggtgctgcgccagggacgcgccagcttcattaccttcaagctggccgaataa

SEQ ID NO: 812 - DNA, 1311 bp, Pseudomonas aeruginosa
atgaccaaacaacccttctacaagagcctgtacgtgcaggttctggtcgccatcgccatcggtatcgcgctcggccactggtacccggaaacggcggtggcgatgaagccgttcggcgacggcttcgtcaaactgatcaagatggccatcgcgccgatcatcttctgcaccgtggtcaccggcatcgccggcatgcagagcatgaagtcggtcggcaagaccggcggcatggcgctgctgtacttcgaggtcgtctccaccgtggccctgatcatcggcctggtagtggtcaacgtggtccagccgggcgccggcatgcacgtcgacccgaacaccctcgacaccagcaagatcgctgcctacgccgctgccggcgagaagcagagcaccgtcgacttcctgatgaacgtgatccccggcaccgtggtcggcgcgttcgccaacggcgacatcctccaggtcctgttcttctccgtgctcttcggctacgccctgcatcgcctgggcagctacggcaagccggtgttcgagttcatcgagcgcgtctcccacgtgatgttcaacatcatcaacgtgatcatgaaggtcgccccgatcggcgcgttcggcgccatggccttcaccatcggcgcctacggcgtgggttcgctggtgcagctcggccaactgatgctgtgcttctacatcacctgcatcctgttcgtgctcatcgtcctcggcggcatcgcccgcgcccacggcttcagcatcctgcgcttcatcaggtacatccgcgaggaactgctgatcgtgctgggcacctcgtcttccgagtcggctctgccgcggatgatcgacaagatggagaagctcggctgcaacaagtcggtggtcggcctggtgattcccaccggttactccttcaacctcgacggcacctcgatctacctgaccatggccgcggtgttcatcgcccaggccaccgatacgccgatggacatcacccaccagatcaccctgctgctggtgctgctgatcgcttccaagggcgccgccggcgtcaccggcagcggcttcatcgtgctcgccgcgaccctttccgccgtcggccacctgccggtcgccggcctggcgctgatcctcggcatcgaccgcttcatgtccgaagcccgcgcgctgaccaacctggtcggcaacggcgtggccacggtagtggtttccaagtggtgcaagcagctcgacgagggcaccttgcagcgcgaactggccggcgagggcaacgcttcgtcgcctgccagcgatattccggtgggcggccgcgaagcggtctaa

SEQ ID NO: 813 - DNA, 885 bp, Pseudomonas aeruginosa
tcaggagaaaaacagccgcgcaatgccgcggaaggtcttctcgttccagtacttcagcggcaagccggagagcagctcccgggccagtaccttgtcccggttcgagcacttgaggaacatcgaattgcggaagcgcatgatcacctgctcgtaatcggggtgatcgctgaactggctgtacgtcttgaatacgttgtccaccatgaaacgggcgttcttgtacgtattggtgggatgcttgcggtactgggcgaggacctcgccaagaatgtcgatgacgtagccagccttggtcaccgccagttcgatatagacatcttccaggcgtatgtccggatcgaaaccgccgaccttctccagggcttcccgccggaacatcaaggtgggcgccatcgggcccggcttgcggtccaggaacaggtcatcgaagtcgagacggcggaaaggcaggtcgcgtttgcgctgctcctttcccggcatgacccggccattggagtcgatgatctcgatattgcccgcgcagatacctacctcgggcttgtcccacatgtgtgccacctgtttctccaggcgttgcggcaacatgatgtcgtccgaaccgaaaggcacgatgagatttccccgggccctggtgatcgcctcgttgagcgttctcgacagtccctggttctgctggaccctgaggtcgaagccgtacttcgcctggagcccgcgcaaaagctcgacgctgccatcgctggaaccatcgtccaccaccagcagttccacgttgcggtatgtctgcgcagccacgctggcgatgctcgcttctatgtacttttcgtggttataggaagcgatgatcacggaaaccaatggctgcgaaccatcatcgacgagcgccat

SEQ ID NO: 814 - DNA, 1470 bp, Pseudomonas aeruginosa
tcaaccaacccggtagttgggggcttccttggtgatctggacgtcgtggacatgggactcggccatgcccgcgccggtgatccggacgaactgcggctgcgtgcgcatctgctggatgtcggcgctgccggtgtagcccatggcggcgcgcaggccgcccatcagctggtggacgatggcggacagggcacccttgtacggcacgcgaccctcgatgccttccggcaccagcttctcggcgccggcggaggcgtcctggaagtagcggtcggacgagccctgggagccggacatggcgcccagcgaacccatgccgcggtaggacttgtaggaacggccctggaacagctcgatctcgcccggcgcttcctcggtaccggcgaacatcgagcccatcatcacacagtaggcgccggcgaccatggccttggccaggtcgccggagaagcggatgccgccgtcggcgatcagcggtacgccggtgccttcgagggcggcggcaacgttggcgatggcggagatctgcggcacgccgacaccggcgacgatgcgggtggtgcagatcgagcccgggccgatgccgaccttgaccgcgtcggcgccagcctcggcgagggccttggcggcctcggcggtggcgatgttgccgccgatcacctggacgtccgggaaggtctgcttgacccagcgcacacgctcgatcacgcccttggagtggccgtgggcggtgtccaccaccaccacgtcgaccccggcggcgaccagcgcggcaacgcgctcgccggtatcggcgccggtgccgacggcggcgccgacgcgcaggcggccctgctcgtccttggacgccagcgggtaggtcttggccttctcgatgtcacggaaggtcaccaggccacgcaggtagaagttctcgtcgaccaccagcatcttctcgatgcggttctcgtagagcttggccttcatctcttccagcggggtgccttcgcgggcggtgaccagcttgtccttcggggtcatgatcgcggcgacggtatcgccggcgttcggcttcacccgcaggtcgcgaccggtgacgataccgaccagctcgccctgctccaccaccgggaaaccggagaagccgtactcgcgggccatctgcagcagttcgatgatcttggtcgagggggtcacggtgaccgggtcgcggacgatggccgtttcgtgcttcttgaccttgcggacttccgcggcctgctgctcgatgcccatgttcttgtggatgatgccgatgccgccttcctgggccatggcgatggccaggcgggcttcggtcacggtatccatcgcggcggataccagcgggatgttcagttcgatgccgcgggtcaggcgagttttcaaactcacgtccttgggcaggacttcggaataaccggggatcagaaggacgtcgtcgaaagtcagggcttcttgactgattcgcagcat

SEQ ID NO: 815 - DNA, 906 bp, Pseudomonas aeruginosa
atgaccctgagtcgcgatgacgccgcccaggttgccaaggtcctttccgaggccctgccctacatccgccgcttcgtcggcaagacgctggtgatcaagtacggcggcaacgccatggagagcgaggagctgaaggccggcttcgcccgcgacgtggtgctgatgaaagcggtcggcatcaacccggtggtggtgcatggcggcggcccgcagatcggagacctgctcaagcgcctgtcgatcgagagccacttcatcgacggcatgcgcgtcaccgacgcggcgaccatggacgtggtggagatggtcctcggcggccaggtgaacaaggacatcgtcaacctgatcaaccgccacggcggcagcgccatcggcctgaccggcaaggacgccgagctgatccgcgcgaagaagctcaccgtgacccgccagaccccggagatgaccaagccggagatcatcgacatcggccacgtgggcgaagtcaccggggtcaacgtcgggctgctgaacatgctggtcaagggcgacttcattccggtgatcgcgccgatcggcgtgggcagcaacggcgagtcctacaacatcaatgccgacctggtggccggcaaggtggcggaagcgctgaaggccgagaaactgatgctgctgaccaacatcgccggcctgatggacaagcagggccaggtgctgaccgggctgtccaccgaacaggtcaacgagctgatcgccgacggcaccatctacggcggcatgctgccgaagatccgctgcgccctggaagcggtgcagggcggcgtgaccagcgcgcacatcatcgatggccgggtaccgaatgccgtgctgctggaaatcttcaccgacagcggcgtcggcaccctgatcagcaaccgcaagcgtcactga

SEQ ID NO: 816 - DNA, 1905 bp, Pseudomonas aeruginosa
atgtctcgactaccggtcattgttggtttcggtggctacaacgcagcaggccgtagttccttccaccacggcttccgccgcatggtcatcgaatcgatggacccgcaggcgcgccaggaaaccctagccggcctggcggtcatgatgaaactggtcaaggccgaaggcggccgctacctggccgaagacggcacgccgctgtccccggaggacatcgagcggcgctacgccgaacgcatcttcgcctctaccctggtgcgacgcatcgaaccgcagtacctcgacccggatgcagtccactggcacaaggtcctcgagctgtcccctgccgaaggccaggcgctgaccttcaaggcctcgcccaagcaactgcccgagccgctgccggccaactggtcgatcgctcccgcggaggacggcgaggtgctggtgagcatccacgagcgctgcgagttcaaggtggacagctaccgtgcgctgacggtgaagtccgccggccagttgcccaccggtttcgaaccgggcgagctgtacaactcgcgcttccacccgcgcggcctgcagatgtcggtggtcgccgcgaccgacgcgatccgctccaccggcatcgactggaagaccatcgtcgacaacgtccagcccgacgagatcgcggtattctccggcagcatcatgagccagctcgacgacaacggtttcggcggcctgatgcaatcccgcctgaagggccaccgggtctcggccaagcaactgccgctgggcttcaacagcatgcccaccgatttcatcaatgcctacgtgctcggcagcgtcggcatgaccggcagcatcacaggcgcctgcgccaccttcctctacaacctgcagaagggtatcgacgtcatcaccagcggccaggcccgggtggtcatcgtcggcaacagcgaggcgccgatcctgccggagtgcatcgagggctacagtgccatgggcgcactggccaccgaagaaggcctgcgcctgatcgaaggccgcgacgacgtggacttccgccgcgccagccggcctttcggcgagaactgcggcttcaccctggccgagtccagccaatacgtagtgctgatggacgacgaactggccctgcgcctgggcgcggatatccacggcgcggtaaccgacgtgttcatcaacgccgacggtttcaagaagtccatctccgcccccggcccgggcaactacctgacggtagccaaggcggtggccagcgcggtgcagatcgtcggcctggacaccgtgcgccacgccagcttcgtccacgcccacggctccagcacgccggccaaccgggtcaccgaatcggaaatcctcgaccgcgtggccagcgccttcggcatcgacggctggccggtcaccgcggtgaaggcctacgtcggccactccctggccaccgccagcgccgatcaactgatttccgccctgggcaccttcaagtacggcatcctccctgggatcaagaccatcgacaaggtcgccgacgacgtccaccagcagcgcctgagcatctccaatcgcgacatgcgccaggacaagccgctggaggtgtgcttcatcaactccaagggcttcggcggcaacaacgccagcggcgtggtgctgtcgccgcgaatcgccgagaagatgctgcgcaagcgccatggccaagcggccttcgccgcctacgtcgagaagcgcgagcagacccgcgccgccgcccgcgcctacgaccagcgcgcgctgcagggcgacctggagatcatctacaacttcggccaggacctgatcgacgaacacgccatcgaggtcagcgccgaacaggtgacggtgcccggcttcagccagccgctggtatacaagaaggacgcgcgtttcagcgacatgctcgactga

SEQ ID NO: 817 - DNA, 699 bp, Pseudomonas aeruginosa
atgagcaacgtcgaccacgccgagatcgccaaattcgaggcactggcccatcgctggtgggaccgcgagagcgagttcaagccgctccacgacatcaacccgctgcgcgtcaactggatcgacgagcgcgccggcctggccggcaagaaggtgctcgacatcggttgcggcggcggcatcctcagcgaagccatggcccagcgcggcgccagcgtcaccggcatcgacatgggcgaagcgccgctcgcggtggcgcgcctgcaccagctggaatccggcgtcgccgtcgactaccggcagatcaccgccgagcagatggccgaggaaatgcccgggcaattcgacgtggtcacctgcctggagatgctcgaacacgtgccggacccggcctcggtgatccgcgcctgccaccgcctggtcaagccgggcggacaggtattcctctcgaccatcaaccgcaatcccaaggcctacctgttcgcggtgatcggcgcggaatacatcctccagttgctgccgcgcgggacccacgatttccgcaagttcattcgtccgtcggaactcggcgcctggtcgcgcgaggccggtctcgaggtcaaggacatcatcggcctgacctacaacccgctgaccaagcactacaagctggccaacgacgtcgacgtcaactacatggtccagaccaagcgggaggcgtga

SEQ ID NO: 818 - DNA, 468 bp, Pseudomonas aeruginosa
atgaagcgtttcctcgccaccgcgctgctcggtctcgccctctgcggcgtggcccgggccgccatcgacacctacgagttcgccagcgacgccgagcgcgaacgcttccgcaacctgacccaggaactgcgctgcccgaagtgccagaaccaggacatcgccgactccaacgcaccgatcgccgccgacctgcgcaagcagatctacggccagttgcagcagggcaagagcgacggcgagatcgtcgactacatggttgcccgctacggtgatttcgttcgctacaagccgccggtcaacgagcgtacctggctgctctggttcggtccgggcgccttgctgctgttcggcgtgctggtgatcggcgtgatcgtcctgcgccgccggcgcaccgctgccaaggtgcaaaccaccctgtccgccgaggagcaagcgcgcctcgccaacctgttgaagaacgacaaatga

SEQ ID NO: 819 - DNA, 309 bp, Pseudomonas aeruginosa
atgaacgcaataccactggaacacggcctggccctcgccagcgtcctgttcgccctcggactggtcggcttgatggtgcgacgcaacatcctgttcgtactgatgagcctggaagtgatgatgaacgccgccgccctcgccttcgtggtcgccggcagccgctggggccaacccgacggccaggtgatgttcatcctggtgctgagcctcgcggccgccgaagcgagcatcggcctggcgatcctgctgcaactgtatcgccgcttccacaccctcgatatcgacgctgccagcgagatgcgcggatga

SEQ ID NO: 820 - DNA, 1281 bp, Pseudomonas aeruginosa
tcagccgatcacctcgatgccagccatgtagggcttgaggacttccggcacacggatcgagccgtccgcctgctggtagttctccagtaccgccaccagggtacggccgacggccaggccggagccgttgagggtgtgcaccagctcgggcttgccggtttccggattgcggtagcgggcctgcatgcgccgggcctggaagtcgccgcagttggagcaggaggaaatctcgcggtacttgtcctggctgggaacccagacttccaggtcgtaggtcttggtcgcaccgaagcccatgtcgccggtgcacagcgccagcacccgatacggcagctcgagcagttgcaggacgcgctcggcgttggcggtcaggccttccagcgcttcgtaggaggtggccggatcgacgatctgcaccatctccaccttgtcgaactggtgctggcggatcatcccgcgggtatcgcgcccggaggcaccggcctcgctgcggaagcacggggtatgggcgacgaacttcagcggcaactgcttggcgtcgaggatctgcccggagacgatgttggtcagcgaaacctcggcggtcgggatcaggtagaggtcggcttcgccgtcgcggccgatcttgaacaggtcctcctcgaacttcggcaactggccggtgccttgcagcgccggagcctggacgagatagggggtgtaggcctcctcgtagccatgctcggcggtatgcaggttgatcatgaactgcgccagggcgcgatgcaggcgggcgatcgggccgcgcatgagggcgaagcgcgcgccggaaagcttggcagcggtctcgaaatccagccagccgtgccgttcaccgagggcgacatggtccttgacctcgaaatcgaaggtcttcggcgtgccccagcgacgcacttcgacgttggcgtcctcgtcggcaccgaccggcaccgactcgtgtggcaggttgggaatgcccagcagcatggcatccagttcgccctggatggcgtccagctggcgcttgccttcctccagctcggagcccatgcggtcgacatcggccagcagcggcgcgatgtcctcgccacgctgcttggcctggccgatcgccttggaacgcgcgttgcgctcggcttgcagctgctcggtacgggtctgtaccgacttgcgctgctcttccagcgcttcgatgcgtgcgacatccagttggaagccacgggtggccaggcgggcagccacttcttgcggctgggtgcgtaccagtttgggatcgagcat

SEQ ID NO: 821 - DNA, 684 bp, Pseudomonas aeruginosa
tcactcgaagcactccaggcgttcgcggtcgaggatgctgatttcgcggccgtcgaggtggatgatgccctcgtcgccgaggcggtgcatgattcgcgagaaggtttccggctggatcgacaggtgaccggccaccagttgcttggccaccgggatttccacccggcagttctcccccggcgcgtgggcggcgagggtcagcaggtagcgcaccacgcggtgggtggcgttcttcagggaaagcgtctcgatctcgtcgatgcgctggtgcaggcgggtgctgagcttggccagcagggccagggccaacggggtgttgtcctgcaactggcgcaggtaggccttgttggagaaacggaacagctggctgggcaccacggcctgggcggtggccacgtagttcggggtgtccatgaacatcatcgcctcggcgaaggtgttgcgttcgttggtcacttcgagaatcttctcctggccttccggggtcagccggtagatcttcacgcagccggaaatcaggtagtagaaggcgtgcgccggctcgccctggcggaacacgtaggcgcccttgtcgaggttgaccaggtcgctgctggcgagcagttcctggagctggacgggagaaagcggttcgaacaggtggtggctttgcagcaactgctggtggacgcgctggaattccat

SEQ ID NO: 822 - DNA, 1581 bp, Pseudomonas aeruginosa
atgatgcacctgctgtggccgaactatatgcgcccgctgccggctttcagcattctccagttcgaccccctgacccgcccgggcggggcgctgcgcgtggagcgcgatacgccggtcgagagccggccggtgggcgaggtcgcctgtcgcttccgtacctgctacgccaccgaagtcctgccgctggtgctggaggcgctcaactattcggtgaccggcgagggtgcgctgctcggcctgcgcctggcgatgaactgcgacgggcatctcggcgagctgggcctgagtcggctgcgcctgcacctggccggcgagcgctacatcagccagatgctctacctgtgcctgctgcgcaacctggagagcatccagctgattccgctggacgcccatgggcggccgctggatggcgtggccggcaagccgatgtcgttccgcctgacgggcgagcgggtgcagccggtggggttcgccgaagacgaggcgttgattccctatccgctgaataccttccgtggctatcgctacctgcaggaatacttcgcgttccaggacaagttcctgttcgtcgacgtggatggccttgacctgctcggcgcgctgcccgaggaaaccctcaagcaggtccgcggcctcgagttgcgcttcgatatccgcaagagcggcatccagcgcctgcacccgacgctggagaacgtcaagctgtactgtacgccggtggccaacctgttccgccacgatgcgctgccgatccgcctcgacggcaagcaggacgagtacctgctgatgccggccgaatacagcctggaggactgcggggtgttctcggtagagggcgtcaccggctggcggccgggcgggctcggctaccaggcctatgtgccgttcgagtccttcgagcacgatcccagcttcgacgtcccggaagcacggccccactacagcgtccggcaacggacctcgttgctgcacgatggcctggacacctacctgagcttcggcatccgccatcccgagcagatcgagacgctgtcggtggaactgacctgcaccaaccagaacctgccccaacggctgcgcctgggcgatatctgcgtcgcttgcgaaggtacgccggagttcctcggtttccgcaatatcaccccggcgacgccgagctacgcgccgccgctgaaccgcgatttcctctggaaactgatcagcaacatgtcgctcaactacctgtcgctggccaacgtcgacgcactcaaggtgatcctcgaaacctacgacctgccgcgctactacgaccagcatgcggcgaaggtcagcaagcgcctgctgggcgggctcaaggcggtccgccacgagcatgtcgaccgcctgcatcggggcctgccgctgcgcggcttgcgtaccgagctgacgatcgatccggaaggctacatcggcgagggcgacctgttcgtgttcgcttcggttctgaacgaatttttcgcgctttacgccagcatcaactcctaccacgagttgcgggtgaggagcacacagggagacgtgtaccaatggaaaccgcgcatgggtttgcagcccctgctgtaa

SEQ ID NO: 823 - DNA, 417 bp, Pseudomonas aeruginosa
atgcgccttgccacccgcgtttcctgtgccgttctcagtgcagccctgctgagccagttgtcggcctgcggtacgctgttctaccccgagcgacgcggccagatcgacggtcgcatcgatccggccatcgtcgccttcgacgccatcggcctgctgttctatatcatccccggcctgatcgccttcggcgtcgacttcgccaccggcgccatctacctgcccgacgccaagtactcggtcgccccggaagtgctcaaggatgccgtcggcgcggacggcaaggtcgacaaccgcaagctcaaggccatcctcgaacgcgagatcggccgtgaactgccgctcgacgacccgcgcctgatccgccacagcggcagcgtcgagcaactggcggcctatggcctgaagccggccgcctga

SEQ ID NO: 824 - DNA, 222 bp, Pseudomonas aeruginosa
atgatcaagcggatgctacccgccctcctcctcgccgtaggcctcggcgccctcgcgggttgttccagccctaccgtgatcaccctcaacgacggacgtgaaatccaggccgtagacaccccttcctatgacgaggattccggcttctacgagttcgaacagctcgacggcaagcgcgcccgcgtgaacaaggaccaggtccgcaccgtcaaggaactctga

SEQ ID NO: 825 - DNA, 345 bp, Pseudomonas aeruginosa
atgctaggtacccggctaaaagccgcaagaatcagagcgggatactcgcagaaacagttgggcatgctggtgggaatggacgagttttccgccagcgcacggatgaaccaatacgaacgcgaacggcactcccccaacatgcggacttccgaacagctggccatggtcctccaggtccccatggcctacctctattgccccgaggacgagctggccgagctcatcctcaaggtgtccagcctgacacccgagttcaagaaagagctgacgcgtttcatcgaacagttgctcgcggcccagggatcaaccagccgccagcctgtacgcacaaggagtgaactgtga

SEQ ID NO: 826 - DNA, 1461 bp, Pseudomonas aeruginosa
atgacctttacgatccaacacttcatcgcgctcctgccactgctgatcaccagcgccaccctggtggtggtgatgctggcggtagcctggaaacgcaatcactcgttcaccgccaccctctcggtgatcggcctcaacctggccctgctgtcgctgctgccggtcctcggcgtcaccccgatcgaggtgacaccgctggtgctggtggacaactacgcctgcttctacatggccctggtgctggtctccgccctggcctgcgtgaccctcgcccacgcctacatggaaagctatccgggtaaccgcgaagagctgtacctgctcctgctgctggccaccgccggcggcctggtgctggtcagcgcgcagcacctggccagcctgttcatcggcctggagctgctctcggtcccggtctacgggatggtcgcctacgccttcttcaacaagcgctcgctggaagccggcatcaagtacaccgtgctctcggccgccggctccgccttcctgctgttcggcatggccctgctctacgccgagtccggtaccctgggcttcgccggccttggcgccaaggtcgccgagcacgtgctgagcggcccgctggtcagcgttggcgtaggcatgatgctggtcggcctgggcttcaagctgtcgctggtgcccttccacctgtggaccccggatgtctacgaaggcgccccggcgccggtctcggcgttcctcgccaccgccagcaaggtcgcggtgttcgccgtgctgctgcggctgttccagatcgccccggcggccctggacaaccaactgctgaacatctccctgagcgtcatcgcggtcgcctcgatcctcttcggcaacctgctggcactgacccagagcaacatcaagcgcctgctcggctactcgtccatcgcccacctgggctacctgctggtcgccctgatcgccagcaagggcatggccgtggaagcggtcggcgtctacctggctacctacgtactgacctccctcggcgcgttcggcgtgatcaccctgatgtccaccccgtacagcggccgcgacgccgatgcgctgttcgagtaccgcggcttgttctggcgccggccggtactgaccgcggtgatgaccgtgatgatgctgtcgctggcaggcatcccgctgaccgccggcttcatcggcaagttctacgtgatcgcggtcggcgtcgagtcgcacctgtggtggctgatcggcgccctggtgctgggcagcgccatcggcctgtactactacctgcgggtcatggtcaccctgttcctggtcgagcccggcatccgccagcacgacgcaccgttcaactggggccagcgcgccggcggcatcatgctggtcgccatcgccctgctggcgttcttcctcggcgtctacccgcagccgctgctggaaatcctccagcattccggcctggccctcgccggctga

SEQ ID NO: 827 - DNA, 549 bp, Pseudomonas aeruginosa
gtgatcaaagaaatcatcaacgtcgtgcatggcaccttcacccagcttcgcagcctggtgatgatcttcggccatgccttccgcaagcgcgacaccctgcaataccccgaagagccggtctacctgccgccgcgctatcgtggccggatcgtcctgacccgcgaccccgacggcgaggaacgctgcgtagcctgcaacctgtgcgccgtggcctgtccggttggctgcatctccctgcagaaggccgagaccgaggacggtcgctggtatccggagttcttccgcatcaacttctcgcgctgcatcttctgcggcctgtgcgaggaagcctgcccgaccaccgcgatccagctcaccccggacttcgagatgggcgagttcaagcgccaggacctggtctacgagaagcacgacctgctgatctccgggccgggcaagaacccggactacaactactaccgcgttgcggggatggcgatcgccggcaagccgaaaggcgccgcgcagaacgaagccgaaccgatcaacgtgaaaagcctgctgccataa

SEQ ID NO: 828 - DNA, 903 bp, Pseudomonas aeruginosa
ttagctggcgagggcggcgagggggacgctggcgccgttgggctgggggcggtagatcgggttgagcggctgcgtgcgctgcgggcggaggaaggccagcagggcgtcctgggtctgctgccaggcggccttgtgctcgacgtcgatgaagtggccggcattgcggatggtgtggaattccgcgccgcggatcagttggccgaactggcgggcttcgtggggcgtggtgtagatgtccagctcgccgttcatgaacagcatcgggatctcgatgccggcgaagctctcggtatagctatcggcgttcaggcgcagcacttcgcggatatggaagtgcatctggtggtattcgtgctcgtccaggctgctgacgtggcggaagttgtagcgcttgaacaactgtggcaggtagcggccgatggtttcgttgaccaggttgccgatctgggtgcgatcgcaggcggcgaggtagtcgaggccgcgatgcaggtagtcgagcatggccgggttgagctgaggcgagaatgagttgaccaccgccctgcggatccgtccgggacgttgcgccagggccagcagggtggcgacgccgccccacgagaacgacatcactacctcggcacggaagcgttcgatcagttccagcaggatcctggcctcgcattccttgctgatcggcgtgtggttttcgttatggggtttggactggccggcatacggctggtcgtagagcaccacgttgtaatgcggctgcaggtacttcacggtctgggcgaaggacgctgtggtcgacagcgagccgttgaccaggatgatggtttgctgcgccgcggggttgccgtagaactcggtgtgaatcctgtattgcccgtggatctcgatgatggctgtttccggcctcat

SEQ ID NO: 829 - DNA, 2751 bp, Pseudomonas aeruginosa
ttagtccagctgcccgtggcagtgcttgtatttcttgccggaaccgcacgggcaaggctcgttgcggccgatcttctgctcgttgcgcacaggctcgagcggcacgaccggagccgggccctcgggaagctcttcttcctcgccggccacggcctgctccatcgagggagcctcggcgtgctggaactgcatgcgcttggccagttcctccgcctcgcgacgcaggcgggcctcctcttcggccgggtcttcgcgacggacctggacgtgggacagcacgcggatggtgtcgcgcttgatcgagtccagcagctcctggaacagggtgaaggactcgcgcttgtattcctgcttcggattcttctgcgcgtagccacgcaggtggatgccgtgccgcaggtggtccatggtcgacaggtggtccttccacaggtcgtccagtacccgcagcagcatctgcttctcgaaggcgcgcagggcttcggcgccggccagctcttccttctcgtagtaggcggcgacgatctgctcgaggatcttgctacgcagggtttcctcgtacagcttgtcgtcttcgtccagccactgctggatcggcaggcgcacggcgaagtcgctgtacagcgcagcctccaggccttcgatgtcccactgctcgggcagcgactgcggcggaatgtgctggttgatggtggcgctgagggtttcctcgcggaattccttgatggtctcgcccacgtcctctgccgacagcagggtattgcgcatgtggtagatcaccttgcgctgctcgttggctacgtcatcgaattccagcagttgcttgcggatgtcgaagttgcgcccttcgaccttgcgctgggccttctcgatggcgttggtcaccatgcggtgctcgatcgcctcgccggactgcatgcccagcgccttcatgaagttcttcacccggtcggaggcgaagatccgcatcaggttgtcttccagcgacaggtagaagcggctggaacccgggtcgccctgacgaccggcacggccgcgcaactggttgtcgatccggcgggattcgtggcgctcggaggcgatcacgtgcaggccgcccgcctcgatcacctgctggtggcgcttctgccattcggccttgatctgggcgatctgctcctcggtggggttctccagggccgcgacttcgacttcccagttgccgccgaggaggatgtcggtaccgcggccggccatgttggtggcgatggtcaccgaaccgggcgcgccagcctgggcgatgatctcggcttccttctcgtggtacttggcgttgagcaccttgtgctcgatgcctgcctcttgcaacagcttggaaacgtactcggaactctcgatcgacgcggtgccgaccaggatcggccggccgagggcctggcactgcttgatgtcggtgatgatcgccgcgtacttctcttcctgggtcaggtagaccaggtcgttgaagtccttgcgcgcgatcggccggtgggtcgggatcaccaccacgtcgagaccgtagatctggcggaactcgaaggcctcggtatcggcggtgccggtcatgccggccagcttgttgtacaggcggaagtagttctggaaggtggtggaggccagggtctggctctcggcctggatcggcaagccttccttcgcctcgatggcctggtgcaggccctcggacaggcgtcggccaggcatggtgcggccggtgtgctcgtcgatcaggaggatctggtcgccctggacgatgtactcgacgttgcggtggaacagggtgtgcgcgcgcagcgctgcgtagacgtgggtcagcaggctcaggttgtgcgccgagtagaggctctcgccttcgccgagcaggccgttctggctcagcaggtcctcgatgaactggtggccctgctcgttgagttcgacctggcgggtcttctcgtcgatgctgtagtggccttcctcggtcggcttgccctcgacctcttcaacctggcgcttgagacgcgggatcagcttgttgatcttgatgtacagctcggagctgtcttcggcctggccggagatgatcagcggggtacgcgcctcgtcgatgaggatcgagtccacttcgtcgaccacggcgaagttcagctcgcgctggaacttgtcgtccaggctgaaggccatgttgtcgcgcaggtaatcgaagccgaattcgttgttggtgccgtaggtgatgtcggcggcgtaggcggcgcgcttgtcttccggcggctggaagggagtgaccacgccgacgctgaggccgaggaactcgtacagcgggcgcatccagttggcgtcgcggcgcgccaggtagtcgttcaccgtgaccacgtgcacgcccttgccggacagcgcgttgaggtagaccggcagggtgcccaccagggtcttgccctcgccggtacgcatttcggcgatcttgccgtcgtgcagggtcatgccaccgatcagctggacatcgaagtggcgcatgcccatcacccgcttgccagcctcgcgaaccacggcgaaggcttcgggcagcaattggtcgagcgtttcgcccttggcgtagcgctgctggaattcagccgttttcgccttcaactgctcgtcggagagcgccaccatctggggctcgagcgcattgatggcctgtacagccttggccatgcgctttacatcacgctcgttcttgcttccaaagagtttcttcaacaaaggcgcaaacat

SEQ ID NO: 830 - DNA, 606 bp, Pseudomonas aeruginosa
tcacaccgccatcgacagcggtacgccctgcagccattccgggtggtagcgcagcagcatctccaggccgcgctcctggtaggccgggaagctgatcgcgaccagcgtctcgcccttgaccttctgcggcgggccgaggcgctggaggatcacgccgttgcgaacgaaatagcgctccatggccgtggtggtcaccgccaccaccgaactggcgcccaggtaccaggcgcattgcaggctggaccagaatatcttcatcgccagctgcggatcgtccgccgcgctggcggcgtagcgcgaaagctcccagaccgacggatcgctcggcggggtttcgctgcacaggtaggcgaagacgtccttgagcaggtaggcgtcggtcgtcggcagcaggcgggcgcaaccgcagatgccctggcggctcatggcgacgatgtagcgggtttgcggatggtcgaactggtcgaattcctggtcgcggaccctggaggtggagaccacgtcccagcccagcttctcgatgaagacctgatgccggtagcgtcccagctcggcgatcatggcggcggaaagcccttccagcgattcagagagcaattcgatcat

SEQ ID NO: 831 - DNA, 1053 bp, Pseudomonas aeruginosa
tcagtgtttacgcaggatcacgctaccgatcgaataaccggcgccgaacgagctgagcaccccgatggcgccgctgggcaggtcgtcctggtgcttgtgcagggcgatcaccgagccggcggaactggtattcgcgtagctgtcgaggatcaccggcgcctcgtgcgcctcggcgtcgcggccgagcagcttgcgggtgatcagtaggttcatgttcaggttggcctggtgcagccagaagcgcttgacctcggcgacctggatttcattggccgccaggtgctcgccgatcagctcggcgaccatcgggcagacatccttgaacaccttgcggccttcctggacgaacagcttgtcgcgcttgccgataccgctctcgtcggcgcggttgaggaagccgaagttgttgcggatgttgttggagaactgggtcagcagcctggtgctgacgatgtcgaactggtgcttcgacacggccaggtcggcgcgctcgacgatcaccgcggtgcaggcgtcgccgaagatgaagtggctgtcgcggtcgcggaagttcaggtggccggtgcagatctccgggttgaccatcaggatcgcccgcgcctggccggtctggatcgcggtggtggcggcctggataccgaaggtggccgaggagcaggccacgttcatgtcgtagccgtagccctggatgcccagcgcggcctgcacctccaccgcgatcgccgggtaggcgcgctgcaggttggagcaggcgacgatcaccccgtcgatgtcggcggcgctgcggccggcacgctgcagcgcctccctggcggcggccacggccatctcgcagaggatcgaccactcgtcgttgctgcgctcgggaaggtacggaaccatgcgctgcgggtcgaggatgccttccttgttcatcacgaagcggctcttgatgccggacgccttctcgatgaacgccgagctggactcggccagcgcctccagttcgcccttggcgatggcctcggcgtgctggtcgttgtactggcgcacgaaggtattgaagctctccac

SEQ ID NO: 832 - DNA, 186 bp, Pseudomonas aeruginosa
ttacttgtccagccgctcgtccacgttcagggagcgagcctcgctctccagcatcaccgggatgccgtcgcggatcggataggccaggccggcctgcttgctgatcagttcggtcttgtcttcgctgagcaccagcgggcccttggtcaacgggcaggcaaggatatcgaggagtttcgggtccat

SEQ ID NO: 833 - DNA, 1035 bp, Pseudomonas aeruginosa
atgagcgaggcgatccgcctgacccagtacagccacggcgccggctgcggctgcaagatttcgcccaaggtactggaggtgatcctcgccggcagcggcgcgcagaacctcgatccgaagctctgggtcggcaacgcctcgcgcgacgacgcggctgtctacgccctcgacgaggagcgcggggtggtctccaccaccgatttcttcatgccgatcgtcgacgaccccttcgatttcggccgtatcgccgcgaccaacgccatcagcgatatctacgccatgggcggcgacccgctgatggccatcgccatcctcggctggccggtcaacgtgctggccgcggaagtcgcccgcgaggtgatcgccggcggccgcaaggtctgcgaggaagccggcatcccgctggccggcggacactccatcgacgcccccgagccgatcttcggcctggccgtgaccggcgtggtggagaagcgcttcatgaaacgcaacgacaccgccgaggccggctgcaggctgtacctgaccaagccgctgggcatcggcatcctcaccaccgccgagaagaaggccaggctgcgcgccgaggacgtcggcgtggcgcgtgactggatgtgcaccctgaacaggcccggcgcgcgcttcggccggttggcgggggtcaaggcgatgaccgacgtcaccggtttcggcctgctcggccacctggtggaaatggccgacggcagcaagctcaccgcacgcgtggagtacgccgcggtaccgcgcctggccagtgccgaatattacctggagcagggctgcgtgcctggcggcaccctgcgcaacttcgacagctatggcgagcgcatcgcgccactgccggaagtgcagaagctgttgctttgcgatccgcagaccagcggcggcctgctggtggcggtggctccggaaggcgaggcggagttcctcgccgtggcggcggaactcggcctgcaactggcgccgatcggcgagctggtcgagcgacagagtctcgcggtacaggtgctgtaa

SEQ ID NO: 834 - DNA, 609 bp, Pseudomonas aeruginosa
ttactgcgccggttgcgggttgccgaaatcgactttcggcgcggtggagatggccgcttcgttttccacgctgaagttcgccttgggcttgtagccgaacagcttggcggtgatcacgccggggaactggcgcagcagcacgttgtattcctgtaccgacttgacgtagcggccgcgagcgacggcgatgcggttctcggtgccttccagttgggtcagcaggtccttgaacaggccgtcggccttcagttgcgggtagttctcggtgactaccagcaggcgcgaaagcgccgagctcagttcgccctgggccttttggaagcgctgcacggcctgctcgtcgtccagttggtcggcgttcagttgcacgctgccgaccttggcccgggcctcggtgacctgggtcaggaccgacgcctcatgggaggcatagcccttcaccgtgctgaccaggttgggcaccaggtcggcgcgccgctggtactggttgagcacttccgaccaggcggctttcacctgttcgtcgccggcctgcatggcgttgtagccgcagccgctgagcagcagggcgaggacgggaaggagggcatttctgaggaatcgaggcat

SEQ ID NO: 835 - DNA, 387 bp, Pseudomonas aeruginosa
atgcgcattctccataccatgatccgggtcggaaacatcgatcgctcgatcgatttctatacccgggtgctaggcatgaccctgctcaggaagaacgactatcccgacggccagttcaccctcgccttcgtcggctatggcaacgaagcggattccgcggtgatcgagcttacccacaactggggcgtggatgcctacgagatcggcaccggctacggccatatcgccatcgaggtcgacgacgcctaccaggcctgcgacgacatccgctacaacggcggccaggtcacccgcgaagccgggccgatgaagcacggtaccaccgtgatcgccttcgtgaccgacccggacggctacaagatcgaactgatccagaagtcttcctga

SEQ ID NO: 836 - DNA, 1311 bp, Pseudomonas aeruginosa
atgctgcattgcttccgtcccaccaccctggcgctggccctgctgctcggcgcgggcgcggcccaggctgccgacgccccggccgacgccgcgccactggccaacggtagcagtgccccgctgcccctcgacgagctgcgtaccttcgccgaggttctcgaccgggtgaaggccgcctatgtcgagccagtggacgacaagaccctgctggaaaacgccatcaagggcatgctcagcaacctcgacccgcactccgcctacctcggcccggaggacttcgccgagctgcaggaaagcaccagcggcgagttcggcggtctgggcatcgaggtcggcagcgaagacggcttcatcaaggtggtctcgccgatcgacgacacccccgcggcccgcgccggcatccagcccggcgacctgatcgtgcagatcgacggcaagccgaccaagggccagtcgatgaccgaagcggtcgacagcatgcgcggcaaggccggctccccgatcaccctgaccatcgtccgcgatggcggcagaccgttcgacgtcgaactcaagcgcgccatcatcaaggtcaagagcgtcaagagccaggtcctcgaacccggctacgcctacctgcgcatcacccagttccaggtcaacaccggcgaggaagtggtcaaggcgctgaaccagctgcgcaaggacaacaagggccgtctcaagggcctggtcctggacctgcgcaacaaccccggcggcgtgctgcagtccgccgtcgaggtagccgacgccttcctcaccaagggcctgatcgtctacaccaagggccgcatcgccaactccgagctgcgcttcagcgccgacccggccgatcccagcgacaaggttccgctggtggtactgatcaacggtggcagcgcctcggcggcggaaatcgtcgccggtgccctgcaggaccagaagcgcgcgatcctgatgggcaccgacagcttcggcaagggctcggtgcagaccgtgctgccgctgaacaacgaccgcgccctgaagctcaccaccgcgctctactacacccccaacgggcgctccatccaggcccagggcatcgttccggacatcgaggtcggacgcgccaaggtgacccaggagcggagcagcttcgagggcttcaaggaagccgacctgcagggccacctggccaacggcaacggcggcgccgaccgccccaccggcaagcgtgccgcgccgagcgagcgcccgcaggattccgactaccagctcagccaggcccttagcctgctgaaaggcctgagcgtcacccgcggcaactga

SEQ ID NO: 837 - DNA, 1107 bp, Pseudomonas aeruginosa
tcattcatctccaagctggtcggccaaggcccgatagtcggtgcgcagggtcgcgtccaagatctcacggggaaaatcgccggtgaccacggcattccccagtccttgcagcaaaaccagacgcaggcggccatcgagcactttcttgtcgacggccatgtgttccataaaatcttccgccgtcatctcggccggcggtaccacgggcaggccagcccggcgcagcagacggataccgcgatcgcgctcggcggcgctcagccaacccaaccgatgcgacatctcgagtgccatcacggttcccgcccctaccgcttcgccgtgcaaccagacgccgtaaccttgctgggtctcgatcgcgtgaccgaaggtatggccgaggttcagcgtggcacgcacgcccgactcgcgctcgtcggcgcccaccacgcgggccttcgccgcgcaagagcgctcgatggcctcggtgacaacggtcggctccagtgccagcaaggcatccatgtgcgcttccagccaggtgatgaacggttcgtcgcaaatgaaaccgtacttgatcacctccgccagcccggcggacagctcgcgggacggcagcgtcttcagcgacgcggtgtcgatgaccaccgcctggggctggtagaacgcaccgatcatgttcttgcccaacggatggttgatcccggtcttgccgcccaccgaggagtcgacctgggacaacagggtggtcggcacctggatgaagttgaccccacgctggtagcaggccgcggcgaaaccggccatgtcaccgatgacgccgccgcccagggcgatcagggtagtcttgcggtcatgccgctccttcagcaggacatcgaagatcagttgcagggtttcccactgcttgtaggcctcgccgtcgggcagcaccacaggggtgacctcgtggccttgcagtgccttgagcagggtttccagatagagaggagcgaccgtttcgttgctgatcaccgcgacccggcgaccgacgatatgcggcgcgaaccagcgggcgtcgcccagcaggttttcaccgatgtaaatgggatagctacgctcgcctagatcgacgtgaagtgtgcgcat

SEQ ID NO: 838 - DNA, 801 bp, Pseudomonas aeruginosa
tcattccatttccttcagccactcggtgttcttgaaccacttgtcgtggatgcgctgataggtgccgtcttcgcggatctgatggaggaagttgttgatgaaattgatgctgtcgtagtcgcctttcttcaggccgaacgccagcggctcgtaggtgaacggctggtcgaggtagaccagcttgccggcgccgaacttgctcaccgccaccacgttgtagggcgagtcgtagatgaaggcgtcggccttgccgttgaccacgtccatcaccgcttccggctcgttgtcgaagccgtggtacttggccttgctgatcagcttgcgggcaacgatctcaccggtggtgccgatcttcgaggtgatgctgtactgcggatcgttcaggtccttgtaggacttgatcttgccttccagttccttgcgcaccagcagggtctggccgaccacgatgaagggctcggagaagttcaggcgcaggttgcgctcctgggtcagggtcatgcccgagccgatcatgtcgaacttgtcggtcagcagcgccgggatgatgccgtcgtagctggtggagaccagctccagcttgacgcccatggacttggccatggccttgagcaggtcgacttcgaagccgatgatctggccacgcttgttggtcatctcgaacggcatgtaggtcgggtccatgccgacccgcagggtgccgcgcttgaccgcgtcctccaccgcgccggccgcctggaccgaagccacgcccaccagggcgcagacgcccagaaccaatgaagcaagatactttttcat

SEQ ID NO: 839 - DNA, 1281 bp, Pseudomonas aeruginosa
tcattcagcgctcccgctacccaccgagtcgccctggaggccgctggggcggccagtctgcggtttctgcggctcgccctcgaggacctgcggggaggcctcggcgacacgcacttccataccgtcgcgcaggcggtcggtgccttccaccaccacctgctcgccggccttcaggccgctttccaccaccacccgctcgttctcgctggtgccgatggcgacgctgcgctggctgaccttgttgtcggcgccgaccacgtagacatagataccgttggtgccgcgctgcacggcgttggccggaatggtcagcacgcctttgagggtctgcgccagcaggcgcacgttgacgaactggttggggaacagcttgccgtcggcgttctcgaagcgcgccttgagcttgaccgtgccggtggtggtgtcgatctggttgtccagggtggtcagggtgccttcggcgagaaccttgtcctggttgcggtccagcgcggtgaccgtcagcttgccggggccgttcatctgctcgacgacggtgccgatctgctgctgcggcaggctgaacaccaccgagatcggcttgacctgggtgatcaccaccagcggcgtggtatcgccgctggtgaccaggttgccgatgtccacctggcgcaggccgaggcgcccggaaatcggtgcgcggacctcggtgaaggtcaggttgaggcgggcgtcgtcgacctggccctggttggtacggatggtgccctgcaactggcggacctgggcttcctgggtatccagggtctgcttggctatcgagtcctcggcatacagccccttgtagcgctgcaggtcgatctcggcgttcttcagttgcgcctggttctgcatcagcgtgccctcggcctgggccagcgccgccttgtaggtgcgcgggtcgaccaccgccagcaggtcgccggccttgacctcctgcccctcctggaacagcaccttgaccagctcgccgttgacccgcggcttgacgttcaccgtgttgaaggcggtgacggtgccaagcgcgttgaaatgcagcgccaggtcgccctgctccaccctggccacgccgacggtgagcgcgttggccttgggcagcgcggcgcccggcttgccgccgcgaccgggtcgcccgtcggaggacggtgccgaggcgggcgccgccagccacatcaccaggccgatcacggcggcgaaggccagggcggtgatcagccacgggcgcagggtacggaacttggatttaccggtcgttggagtcat

SEQ ID NO: 840 - DNA, 651 bp, Pseudomonas aeruginosa
tcagagcggcagcggccgaagccggccggcgctcttgccggattgcccgtcgggcgtgcagcctttcaggaccaggcgggtgatggtttccaccgcagcgtcgtagtcggcgtcgctgagctgttccttgccggtgacgatggaaatctgccaatcgaagtcggcataggtctgggtcgccgcccagatggcgaagagcaggtgatgtgggtccaccggggcgagctggccacggtcgatccaggtctgcaggcaggtgacgttgcgctgggcctgggcgttcagttcgtcgaggtattccttcggcaggtgcggcgcgccgtgcatgatctcgctggcgaagaccttggaggcatgcggcagctcgcgggagatgcggatcttcgagcggatgtaggcgggcagggcgagcagcgggtcgtcttccacgcggaacggcgccgacgcttgcagcagcggctcgacgatgctttccagcacgcagcgatagaggttttccttggactggaagtagtagtagacgttgggcttgggcaggccggcgcgggcggcgatgtcgctggtcttggtcgccgcgaagcccttgtcggcgaattcctcgctggcggcgcggaggatcaggcgcttgttgcgctcgcggatgctggtcat

SEQ ID NO: 841 - DNA, 1017 bp, Pseudomonas aeruginosa
atgagtgagaatcgtctcgccgccaaactgaccaaggtcgacaaggccgccatcctgctcctgtcgctcggcgagaccgacgcggcgcaggtgctgcggcacatgggaccgaaagaggtgcagcgggtcggcgtggccatggcgtcgatgcgcaacgtgcatcgcgaacaggtcgagcaggtgatgggcgagttcgtcgaagtggtcggcgaccagaccagcctcggcgtcggtgccgacggctacatccgcaagatgctcacccaggccctcggcgaggacaaggccaacaacctgatcgaccgcatcctcctcggcggcagcaccagcggcctggacagcctgaagtggatggagccgcgtgccgtggccgacgtgatccgttacgaacacccgcagatccaggccatcgtggtcgcctacctcgatcccgaccaggccgccgaggtgctcagccatttcgaccacaaggtgcgcctggatatcgtcctgcgcgtctcctcgctgaacaccgtgcagccctcggcgctgaaggaactcaacctgatcctggagaagcagttcgccggcaattccaacgccacccgcaccaccatgggcggggtcaagcgcgcggcggacatcatgaactacctcgacagctccatcgaaggccagctgatggattcgatccgcgaggtcgacgaagacctgtccggacagatcgaggacctgatgttcgtcttcgacaacctcgccgacgtcgacgaccgcggcatccaggcgctgctccgggaagtctcctcggacgtactggtgctggcgctcaagggctccgacgaggcgatccgcgagaaggtcttcaagaacatgtccaagcgtgccgccgagctgctgcgcgacgacctggaggccaaggggccggtacgggtcagcgaagtggaaggtgcgcagaaggaaatcctcaccattgcccggcgcatggccgagtccggcgatatcgtgctgggcggcaagggtggcgaggagatgatctga

SEQ ID NO: 842 - DNA, 960 bp, Pseudomonas aeruginosa
tcagcgacgcaccacgcccgggaggacgcagagcatttcatagagcaggttggcgcccagcaacgaagtgttgccggtggtgtcgtagggcggcgagacttcgaccaggtcgcagccgatcaggtccaggccctggcagccgcggatgatttccatcgcctggatggtggtcaggccgccgatttccggggtgccggtgccgggcgcccaggccgggtcgatgccgtcgatgtcgaagctcaggtagacggggccgccgccgaccttctcgcggacctcggccatcagcggctccagcgacttgtgccagcactcctcggcctgcaccacgcggaagccctgcttgcggctccagttgaagtcctcggcggtgtagccctgggcgcgcaggccgatctgcacaacacggtcgcaatccagcaggtcttcttccaccgcgcggcggaaggtggtgccgtgggcgatcttctcgccgaacatgtggtcgttgacgtcggcgtgggcgtcgacgtggaccaggccgaccttgccgtgcttcttcttgatcgcgcggaggatcggcagggtgatggtgtggtcgccgccgagggtcagcgggaggatgccgtgaccgaggatgcggtcgtattcctgctcgatgatgcgcacggcttccagcaggttgaaggtgttgatcgcgacgtcgccgatgtccgccacgttcagcgagtcgaagggggcggcgccggtggccatgttgtagggacggatcatcaccgattcggcgcggatctcgcgggggccgaagcgggtaccggagcgcagggaggtgccgatgtcgaggggcacgccgacgaaggcggcatcgagggcgtcgagttcggcgggggactggacatggggcaggcgcatcatggtggcgatgccgccgaagcggggcatttcattgccgcccaggggctggtggagattcttgtccac

SEQ ID NO: 843 - DNA, 354 bp, Pseudomonas aeruginosa
gtggacagagtttttatcgaaggcttggaggtcgataccgtcatcggcgtgtacgactgggagcgcggcatccgtcagtgcctgcgcctggacctgaccctgggctgggacaaccgtccggccgccgcgggcgacgatctcgccctggcgctggactatgccgcgttgtccgagcgggtgcaggaattcgcccgggaatcgcatttccagttggtggaaaccttcgccgagcgcctcgccgaggtactgatgggcgagcgcggcattccctggctgcgcatccgcgtgaccaagcccggcgcggtgccggcggcccgtggcgttggcgtggagatcgaacgcggatgtcgctga

SEQ ID NO: 844 - DNA, 1443 bp, Pseudomonas aeruginosa
tcatgcgcccttccctcccttgccggcgaacagcgggttcttgatcagttgcggggccaggccgccgacatcgccagcgccctggcaaagcaggatgtcgccagcgcgcagcagcggcttgaccagcggcgccaggtcggcgtcgcgctcgaagtagatcgggtcaagctggccgcgctggcggatgctgtggcacagctggcggctgtcggctcccgggatcggctcttcgccggccggatagacctccatcaacagcagcacgttggcttcgcccagcacctgcacgaagtcttcgtacaggtcgcgggtacgggtatagcgatgcggctggtagaccatcaccaggcgacgctccggccaaccgccacggatcgccttgatcaccgcggcgacttcgcgcggatggtggccgtaatcgtccaccagcatcacgctgccaccctcgacctgcagctcgccgtagacctggaagcgccggcctacgccctggaagccggacagcccctggacgatggcttcgtcggagatgccctcgtcggtagcgatgacgatggtcgccagggaattcagcacgttgtgcaggccgggcatgttcaccgagacgtccagcggctcgcgctccgggcgcaacacggtgaaccaggtgcgcatgccttcctggcggatgttgatcgcgcgcacgtcggcgtcttcgctgaggccgtaggtcacggtcgggcgggcgatctgcgggaggatctcacgcacaaccggatcatccacgcacatcaccgccagtccgtagaacggcaggttgtggaggaactcgacgaaggtcttcttcagcttgttgaagtcgccgccgtaggtcgccatgtggtcggcgtcgatattggtgaccaccgcgaccatcggttgcaggtgcaggaagctggcgtcgctctcgtcggcctcggccaccaggtagcggctggcgccgagctgggcgttggtcccggcggcgttcagccggccgccgatgacgaaggtcgggtccaggccgccggcggcgaacaccgaggcgatcaggctggtagtggtggtcttgccgtgggtgccggctaccgcgatgccgtgccggtagcgcatcagctcggcgagcatctccgcacgcggcaccaccggaatccgccgttccagggccgatgccacttccgggttggcccggttgatggcactggacaccaccagcacgtcggcgccgtcggcgttttccgcctggtggccgatgaagatctgcgcgccgaacttctccaggcgctcggtcaccgccgaggccttgaggtccgagccggatacctcgtagccgaggttcagcagcacttcggcgatcccgcacataccggcgccgccgatgccgacgaaatggatgcggcggatacggcgcatggtccgggtgacgccattcggttctttaaccac

SEQ ID NO: 845 - DNA, 1098 bp, Pseudomonas aeruginosa
ttattcggcgggcaggtattctacaacttccaggtcgaaaccggatatcgcattgaagcgcatcggcgcactcagcaggcgcatcttgcgcacgccgaggtcgcgcaggatctgcgaaccggcaccgacggtgctgtaggtggtggtggccttgggcgccggagccggcgccgaagcgatctcgcggacatgggcgagcaggtcgtcgccgccgatctggtgaccgagcagcagcaccacgccgctgcccgcctcggcgaccttggtcatcgccgcgcgcaggctccagcggcccggttggttgacctgcagcaggtcgcgcagcgggtccatgttatgcacgcggaccaaggtcggctcttccgcgcagaccttgccgagggtcagcgccaggtgcacgtcgccctccaccgagtcgcggtaggtgatcaggttgaagtggcccagttcgctgtcgagcggctgctcggcgatgcgctcgacggtgcgctcgtggatcagccggtagtggatcaggtcggcgatggtgccgatcttgatcccgtgctcggcggcgaacgcctccagttcgggccggcgagccatgctgccgtcgtcgttcatcacctcgcagatcaccccggacggctcgaacccggccatccgcgccaggtcgcaggccgcctcggtgtgcccggcgcgagccagggtaccgcccggctgggccatcagcgggaagatgtggccggggctgacgatgtcggcggccacggcgttcttcgccgccgcagcctgcacggtgcgggcgcggtccgcggcggagatgccggtggtgacgccctcggcggcctcgatggagacagtgaacttggtgccgaagccggagccgttgcgctgcaccatcagcggcaggccgaggcgctcgcaacgctcgcgggtcatcggcatgcagaccaggccgcgggcatgcttgaccatgaagttgatgtcttcggtgcggacgcattcggcggccatgatcaggtcgccttcgttctcgcggtcctcgtcatccatcaggatgaccatcttgccttggcggatgtcttcgatcagttcgtcgatcgtgttgagtgccat

SEQ ID NO: 846 - DNA, 597 bp, Pseudomonas aeruginosa
tcagagcagttcccgggcctgggcgacgatcgccgcgaagttgtcgccgagggcggcgatctcggcgcgttgcagatccgcggcgctcaggaccccgccgttcagggtgggtatgtcgcgggtggcgcaggcgctatcggcgagggtgcagcggtagccgtagtccttggccgcgcgcacggtggtgctgacgctggaatgggtcatgaagccgcagacgatcaggtcgagacggccgtggttctgcagcaggtcgtgcagctcggtgccggagaaggcattgggcaggcgtttctccacgaccttttccccggcttccggttgcagttccgggaggaactggccgcgcggcccttgcggatcgaacaggccgccctggatacccaggtggcgtacatgcacgatgggcgtaccgctggcgcgggccgcctgcaccagcacgccgatctccgcggcggcggcgtcgaggcctggcaggcgcagggcgccgctgcggtactcttcctgggcatcgatgatcagcaaggtgctctgccgaaggggggctggcgggtagccgcgtccgctgatctgcaaaagggtgagcggatgaggcat

SEQ ID NO: 847 - DNA, 1335 bp, Pseudomonas aeruginosa
tcaggctgcctcgctcttggccgcggccatcagcgcctcgatctcggcgacggtcttcggcacgccgttggtcagcacttcgcagccattgcgggtgaccaccacgtcgtcctcgatgcgtacgccgataccgcgccacttcttcgccaccgtggtattgtccggggcgatgtagatgcccggctcgacggtcatcgccatgcccggttcgagcacccgccattcgccgccgacgcggtactcgccgacgtcgtgcacgtccatccccagccagtggccggcgcggtgcatgtagaaagccttgtaggcctcgtgggcgatcagctcgtcgacgtcgccctccagcaggcccaggcgcaccagcccggcggtgatgacccgtacggtggcctcatgggcctcgttccagtggcgaccgggggcgatgtagtcgaacgccgccatgttggcttccagcaccagttcgtagatcgccttctgctcgggactgaagcggccattggcggggaaggtacgggtgatgtcgctggcgtagcagtcgatctcgcagccggcatcgatcaggatcaggtcgccgtccttgatcgccgcatcgttctcgcggtagtgcaggatgcaggcgttgcgtccggcggcgacgatcgagccgtaggccggcatcttcgccccgcccttgcggaactcgtattccagttcggcttccaggtggtactcgaacagccccggccggcacacctccatcgcccggatgtgcgcccgggcggagacctcggcggcgtagcgcatgaccttcacttcgttggcgctcttgtacagccgctggtcgtgcagcaggtggtcgagggcaacgaactcgttcggcggctgcgcgccctggcgggccttggagcggatcacgttgatccagtccatcagccggcggtcgaagtcgggattggcgccaagggcgtagtagacccggtcgcggccttcgatcaggccgggcaggatgtcatcgatatcgccgatgggaaaggcgtcgtcggcgccgtactggccgatcgcaccgtcctggccggcgcgcaggccgtcccacagttcacgctccggatcccgctcgcggcagaaaagcacgtattcgccgtgggcacggccgggaatcagcgccatcaccgcctccggctctgggaagccggtgaggtactggaagtcgctgtcctggcggtagacatgctcgacgtcgcgattgcggatgtacatcggcgccgccggcaggatggcgatgctgttgggttccatctgcgccatcagcgccttgcgccgacgggcgtactccgacttggggatacggatcat

SEQ ID NO: 848 - DNA, 717 bp, Pseudomonas aeruginosa
tcagctcttttcgccagtgacggtcttgccgtcgatggtgccttccttgagcatgatctggtattccttgccgtcggtttccatctggtacaggcggaccagcaggtagtcccagtccttggcgaaccagaggatggtcttgcggttgctcttgcccggatcacgcacgcgctcgaccttgatcgcgttgatcaggccggcctgggtgcgtaccttttcctcgccgagaacccggaagtcgtaggtatcgacatcctcgccctcgatgatctggtagctcatgctcttcttgccgtcggcaacgtcatgctgcaggaccagttgataggtggacttgtccagttgaccgcgattcaggggttgccgcaccgcatcgccgcggtcgctgccgagcacctgcttctgcgaccagtcgaagtccagctcgatctgcttacctttgcccagaccctggcgggcgaagcggtaggtctgcggcaggaaggtgtcgttctcgaccttgaaggtgctgacttcgttgagactggccagcagcatggaggcctcgaagtccagttgccagcggccgtcgccgagagccttcaggctgcgggaggcattgccgctgatgggcatctgtttccagtcggcggtatagctggcggtgaacggcttcagctcgaaggcataggccggcagggtcagcagcgtcagcaggaacagcatggctttacgcat

SEQ ID NO: 849 - DNA, 420 bp, Pseudomonas aeruginosa
ctagctagtcgatggcaggtactccggcatcgccgacaagtgctcatggcaggccagccaacggccttcttgttgttctaggcggaacaggatggtttcccgttcccggttcaggctttccgttccctggaggcgcagccgggtggcgacatcgtggctgaagatcgccaggtcgccttgcaggctgacgcaggtattgctggattcgcacgccagcacttcgaagccgtcctcgcgtcgccagcgctcccacaacttgcggtaggccgcgcgcgagcgcagcggctgaggccagttgtggaagatgaagctggcgtcctcgctgaaggcggcgaaataggcctcggcatcgttgcgggcgaaggccgccaccagtcggcgggcggcctccagcacctgttcgacgcggtcgtcggtcat

SEQ ID NO: 850 - DNA, 627 bp, Pseudomonas aeruginosa
atgagctcgctgctgatccaggccgtgctggccgccgccgaaaccggcatcaatcgcgtcctgcgcctcgacgggacagcgctgccgcgcctgcgcaggctttccgccaaggtcatcgaggtcgactgcctgagcccgccgctgcgggtcttcatcctgcccgccggcgacggcctgcacttcgccgcgcagcatgaggcggaggtcgactgcaccctgcgtgcgccggccggcaacctcctgcacctggccctggcgcgcgacaagacccgcatcctgcacagcccggaagtcagcatggacggcgacagcgcggccctgctggaactggccggcatcctgcagagcctggagctggactgggagtacgaactgtcgcgctggctcggcccgctcgccacccaggtgctcggcagcagcctgcgcgacgcttcgcgctggagcgcgcagagcctgcacagcctgcgcctgaacctggccgactaccttgccgaggaaagccgtacgctggtcggccagcacgaagccgaagcccgcttcgccgaactggaccagctgaagctggccctcgatcgtctcgacgcgcgcgtcggacgcctcagccaaaagaccaagcccgacgcatga

SEQ ID NO: 851 - DNA, 1815 bp, Pseudomonas aeruginosa
atgatcgcttgcctgcgtccgctttctgctctgatcctggccggtctgctgaccgcctgcgcgacctcgtccaattccggactgggcgaacttccccgtacgccgaatgccagcatcgagcagttgttgcaacaggccagccagagcaagcccgaggaagcggcgctgctgcgcctctcggcagcggaccttgcctaccagcagaaggacctcgccaggtccaccgccatcctgggacagattccgctggaaagcctgaagccggcccagcaggtcttcgccagcaccctgaacgccgaactggccctcgcccgcagcaagcccaaggccgccctgcaggcattgcagcatccgagcatgcagcatctcagcgaactgccggtgacccagcaggttcgtacccagcgcgccaaggcccaggccctcgccgccgacggccaggtccttgccgcagccaaggagcgcatctacttcgcaccgctgctcgagggcccggcggtgatcgagaaccaggaaaagatctggaccctggtcagcagcctgccggtcgaccagttgcaaccgagcgccaacgaaggcgacctcagcggctggctgaccctggcacgcatcaccaagacctcgccgaccctgcagcaacagcaggccagcatcgagagctggcaacagcagaaccccgagcacccggcggccaagcacttgccggcggcgctggagaaactcaagacgctgtcccagcagccgctgacccgcatcgccctcctgctaccccagcaggggcagttggccaacgtcgcccgggccctgcaggacggcttcctcgccgcccacttccaggcccagcaggccggccagaatcctccttcgatcaagctctacgacagtacccaggtgcgctcgctagatgacttctaccgccaggcccaggccgatggcgtcgaactggtcgtcggtccactggagaagccgctggtcaagcaactcgctagccgcgagcaactgccgatcaccaccctcgcactcaactacagcgacaacagccaggaaggcccggcgcagctgttccagttcggcctcgccgccgaggacgaagcgcgcgcggtggccagccgggcctggggcgacggcatgcgccgggccgtggcgctggtgccgcgcggcgaatggggcgaccgcgtgttggccgccttcagccagagctggcagtccgcgggcggcagcctgatcgccgccgagcatgtcgaccagccggtacaactggcgcaacagatcgccgacctgctgcaactgcgccagagcgaaggccgcgcccagcgcctgcagggcgccctcggcagccagatcgccacccagccgtcgcgccgccaggacatcgacttcgtgttccttgccgccaccccgcagcaggcccgccagatcaagccgaccctggccttccagtacgccggcgaccttccggtctacgccacttcgcacctctacaccgggaccaacaacccgacccaggaccaggatctcaacggcatccgcttctgcgagaccccgtggctgctcaaccccagcgacccgacccgccagcaggtcgccgcccaatggccccaggccaacggcagcatgggccgcctctacgccatgggcgtcgacgcctaccgcctcgctccgcgtctgcctgaactgaaggccgtgccgagcctgcagatcgacggcctgaccggtaccctgagcctgaatccgacccaacgtatcgaacgccagttgcaatgggccgagttccgcaatggccaggtccagccgctggggaccagcagcttttga

SEQ ID NO: 852 - DNA, 294 bp, Pseudomonas aeruginosa
atgagcacacccctcaccctgatcgccaccatcaccgccgcccccggccacgccgaggccctggaacgcgaattgcgcgccctggtcgccccgtcgcgcgccgaggctggttgcctgcagtacgacctgcaccaggaccgccacgactcccacctgttctacatgatcgagcagtggcgcgacgacgccgccctggagcggcaccagaacaccgaacacttcctgcgcttcagccgcggcaacgaagccctactgcagaacgtgaagatcgaccaactctatcgcctcgcctga

SEQ ID NO: 853 - DNA, 291 bp, Pseudomonas aeruginosa
atgtccgatagcctgcaactgatcctcgaagataccgacggcacccagctggaaacttcctgcacccgtttcgccgtggtctggcagggcaaggaagtgtgggtccagcaagccggcaacggccagttgctgatcggcgtcgacgtcgaagacggcgataccgaatacaccaacctgctgctgcggccgatggcgaccaacctggtcagcctgcaactggagatggagccgatcgaagagggcgacgaccacgagcacggccccgactgcggctgcgaccacacccactga

SEQ ID NO: 854 - DNA, 1656 bp, Pseudomonas aeruginosa
gtggaacgcgaatacatggaattcgacgtcgtcatcgtcggcgccggccccgccggtctgtccgccgcatgccgactgaagcagaaggccgccgaagccggtcaagagatcagcgtctgcgtggtcgagaagggttccgaagtgggcgcccacatcctctccggcgcggtgttcgagccgcgcgcgctgaacgagctgttccccgactggaaggaactcggcgcgccgctcaataccccggtgaccggcgacgacatctacgtcctgaagagcgccgagagcgctaccaaggtgcccaacttcttcgtgcccaagaccatgcacaacgagggcaactatatcatctccctgggcaacctctgccgctggctggcccagcaggccgaaggactgggcgtggagatctatccgggcttcgccgcccaggaagcgctgatcgacgagaacggcgtggtccgcggcatcgtcaccggcgacctcggcgtcgaccgcgaaggcaacccgaaagaaggctactacacccccggcatggagctgcgggccaagtacaccctgttcgccgaaggctgccgcgggcacatcggcaagcaactgatcaagaaatacaacctggacagcgaggccgatgcccagcactacggtatcggcatcaaggaaatctgggacatcgacccgtccaagcacaagcccggcctggtggtccataccgccggctggccgctgaacgacgaaaataccggcggctcgttcctctaccacctggagaacaaccaggtgttcgtcggcctgatcatcgacctgtcctacagcaacccgcacctgtcgccgttcgacgagttccagcgctacaagcaccacccggtggtcaagcagtacctggaaggcggcaagcgcgtggcctacggcgcccgggccatctgcaagggcggcctgaattcgctgccgaagatggtcttccccggcggcgcgctgatcggttgcgacctcggcaccctgaacttcgccaagatcaagggcagccacaccgcgatgaagtccggcatgctcgccgccgacgcgatcgccgaggccctggccgccggccgcgaaggcggcgacgagctgtccagctacgtcgatgcgttcaaggccagctggttgtacgacgaactgttccgcagccgcaacttcggcgcggccatccacaagttcggcgctatcggcggcggcgcgttcaacttcatcgaccagaacatcttcggcggcaagatccccgtcaccctgcatgacgacaagccggactacgcctgcctgaaaaaggccagcgaagcgccgaagatcgactacccgaagccggacggcaagctcagcttcgacaagctgtcctcggtgttcctctccaataccaaccacgaggaagaccagccgatccacctcaagctggccgatgcgagcattccgatcgagaagaacctgccgctctacgacgagccggcccagcgctactgcccggcaggcgtgtacgaagtggtggccaacgacgacggcagcaagcgcttccagatcaacgcgcagaactgcgtgcactgcaagacctgcgacatcaaggacccggcgcagaacatcacctgggtggcgccggaaggtaccggcgggccgaactaccccaacatgtaa

SEQ ID NO: 855 - DNA, 933 bp, Pseudomonas aeruginosa
atgaccctcaccgaactgcgctacatcgtcaccctcgcccaggaacaacacttcggccgcgccgccgagcgttgccacgtcagccaaccgaccctctcggtcggcgtgaagaagctcgaggacgagctgggggtgctgatcttcgagcgcagcaagagcgccgtgcgcctgacgccagtgggcgaaggcatcgtcgcccaggcgcagaaggtcctcgaacaggcccagggcatccgcgagctggcccaggccggcaagaaccagttggccgcgccgctgaaggtcggcgccatctacaccatcggtccctacctgttcccgcacctgattccccagctgcaccgggtcgcgccgcagatgccgctgtacatcgaggagaacttcacccatatcctccgcgacaagctgcgtaccggcgaactcgacgcgatcatcatcgccctgccgttccaggaagccgacgtcctgaccaagccgctgttcgacgagcccttctatgtgctgatgccggccgaccatccctggaccgccaaggccagcatcgattccgagctgctcaacgacaagagcctgctcctgctcggcgaaggccactgcttccgcgaccaggtgctggaagcctgcccgaccgtgcgcaagggcgacgagaacaagcacaccacggtggagtcctcgtcgctggagaccatccgccacatggtcgcctccggactgggcgtctcggtgctgccgttctccgcggtggacagccaccactacgcgccgggcgtcatcgaagtgcgcccgttcagcgcgccggtgccgttccgtaccgttgccatcgcctggcgcgccagcttcccgcgtccacgcgccatcgaagtgctggccgactcgatccgcctgtgctcggtggcccgtccgcaaacccaggaacaaccgcaaatagcatga

SEQ ID NO: 856 - DNA, 591 bp, Pseudomonas aeruginosa
tcagaactgttccggcggcacttcgcggaagttcagcacggcgaacaccggtacctcgggagtgatcgagggaatattggccatctccttcaagggcttgagcttctcttccaggtcgaagtcgagcagcttcagcagcaccggctccagggtcgccacctggaccagcccttcgccctggcgggtgaccagcacgtcggccttcaggcggcgctgctggccgtgcaggtcgagggtgaagtcgagcttctcgacccgcgactggccgacccgcaggtcgtcgaagccggccatgtccaggcggctctccacggtggcctcggggaagcgcgaggtttcgaagaagttgtccttcattcgctcgtcgcgcagggccaggccgctgtccagggtgcccagcggcaccacgatgcgcgcgacgccctgcttgtcgatctgcccgctgagacgatcgaagcgctgcacctcggccatcttcgcgcgtttcacggaaacgaagctgatccgcgagtaatccggctccagttgccattccgccgccgacagcagagggctgaggagcaacaacaggacacacaatacaacaggcat

SEQ ID NO: 857 - DNA, 762 bp, Pseudomonas aeruginosa
ttacttcttcgcgtccgccttggcttcgggctgcgctgcggcaccggcctcgggctccgcgtccggcttggacggatccttgatgccgagcagttccatgtcgaagaccagtaccgagttggccgggatcgccgggctcgggctctgcgcgccgtaggccagctcgctggggatgtacagcttgatcttctcgccgacgtgcatcagttgcagggcttcgacccaacccgggatcacgccgctgaccggcaggtcgatcgggctgccgcgctcgatggagctgtcgaagacggtgccatcggtcaggcggccttcgtagtggacggtcaccacgtcggtggccttcggttgcgggccatcggccttcttcacgatttcgtactggaggccggaagcggtggtggtcacgccgtcgcgcttgccgttttcctcgaggaatttcttgccggccttggcgttttcgtcgccgatggcggccatccgctcctcggcacgtttctgcaggaaggcgaaggcttcggtcagctcttcatcggtgagctgctgcttcttcttgccgagggcgtcttcgatgcccttggcgacggctttcgaatccaggtcgtccatgccttcctgggacaggctcttgcccatgttcaggccgataccataggaagctttctgcgccggggtcttcaactcaacgttggtctgcgaatcgcagccggagagaaccagaccgaccagtgcgatcgctgctgccaaccgatgttgtttcat

SEQ ID NO: 858 - DNA, 315 bp, Pseudomonas aeruginosa
atgagccagtcgaataccctcaccgtgcagattctcgacaaggaatactgcatcaattgcccggacgacgagcgcgccaacctggaaagcgccgcccgttacctggacggcaagatgcgcgagatccgctccagcggcaaagtcatcggcgccgaccgggttgccgtgatggccgccctcaacatcacccacgacctgctgcaccgcaaggagcgcctggaccaggaaagcagctcgacccgcgagcgcgtgcgcgaactgctcgatcgcgtcgaccgcgccctggcgaatccggccgatgccggcgaagcctga

SEQ ID NO: 859 - DNA, 519 bp, Pseudomonas aeruginosa
atgggaagcactaccagcagtcagaagttcatcgccaggaaccgggcgccacgcgtgcagatcgagtacgacgtggagctgtacggtgccgagaagaaggtccagctgcccttcgtcatgggcgtcatggccgacctcgccggcaagcccgccgaaccccaggcggcggtcgccgaccgcaagttcctggagatcgacgtggacaacttcgatgcccggctgaaggcgatgaagccgcgggtggccttcaacgtaccgaacgtgctgaccggcgaaggcaacctgagcctggacatcaccttcgagagcatggacgacttcagccccgccgcggtggcgcgcaaggtcgattcgctgaacaagctgctcgaggcgcgtacccagctggccaacctgctgacctacatggacggcaagaccggcgccgaggaaatgatcatgaaggcgatcaaggacccggccctgcttcaggccctggccagcgcgccgaagcccaaagacgacgagccgcaggcgtaa

SEQ ID NO: 860 - DNA, 471 bp, Pseudomonas aeruginosa
tcatgccttggcctcctgcaacttggcggaggcgttgtggatcgccgtcttgatccggttgtaggtgccgcagcggcagatgttgccggccatggccgcctcgatctgctcgtcgctgggcgcggggttgctcttcagcaacgccgtggccgacatgatctgcccgccctggcagtagccgcactgcgccacgccgatgtccagccaggcctgctggacgacttcgccgaccttgtcggtgtgcaggtggtcgatggtggtgaccttcctgccctgcgccaggctcaccggcgtgatgcaggaacgggtggcctggccgtcgatatggatggtgcaggagccgcacaggcccatgccgcagccgaacttggtcccggtatagccgacgacgtcgcggatagcccagagcaagggcatatcctcggtgacatcgagctgatgatccttgccattgaggttcagggtaatcat

SEQ ID NO: 861 - DNA, 1335 bp, Pseudomonas aeruginosa
ttattcgagggtggcctgcttgcccttggcttcgccgaccgcctgccgcaggtgcggcagcgaatcccagtagcgctggcccttggccgcgtcgtacatgccttcccacttggagatgaccagcaccgcgagggcattgccgatcacgttgagggcggtgcgcgccatgtccatgatgcggtccacgccggcgatgaaggccaggccctcgagcgggatgccgacgctgcccagggtggcgagcagcaccacgaaggatacgcccggcacgccggcgatacccttggaggtcaccatcagggtcagcaccagcatgatctgctggccgatggacaggtcgatgccgtaaagctgcgcgatgaagatcgccgcgatgctctggtacagggtcgagccatcgaggttgaaggagtagccggtgggcaccacgaagctgctgatcgccttcggcgcgccgtaggcttccattttctcgatgatgcgcggcagcacggtttccgagctggcggtggaataggcgaggaccaggtcgtccttgaagatgcggatcaggcgcatgatcgagaagccgaacatccgcgcgatcaggcccagcaccaccagggcgaagaagacgatggccacgtagaccaggatcaccagcttggccagcggcagcagcgaggcgaagccgaagttggcgacggtcaccgcgatcagggcgaagacaccgataggggcgtacttcatgatcatgtgggtgaccttgaacatggtctcggaaacgccctggaacaccttcaccagcggctcgcgcagatcgttgggcaggctcgacaggccgaggccgaacatcaccgagaagaagatgatcggcagcatctcgccacgggcgatggcggcgaagacgttggagggaatcaggttgaggatggtcgcgatgaacgcatggtcatgctgcacttcctgggtggtcttctggtactgggaaatgtccacggtacccagggtgctcatgtcgatgccggtgccgggctggaacaggttggccagcagcaggccgacgacgatggcgacggtggtgacgatctcgaagtagatgatggtcttcaggccgatgcggccaagcttcttcgcgtcgccgacgccggcgatgccgaccaccagcgaggaaatcacgatcggcaccacgatcatcttgatcagacggatgaagatgtcgccggccggttgcagcacgttggcgatccaccaggccttttcggcgctgaaatggttgagcactgcgccgacggcgataccgagtgccagaccgatcacgatctgccaggcgaggcttagcttggctttacccat

SEQ ID NO: 862 - DNA, 1353 bp, Pseudomonas aeruginosa
atgttcggcatgtcacacgatgcctacctgctcctcgacgccctggtgaccatcatcggcctgatcgtgctgatcacccgcttcaaggtgcatcccttcatcgccctgatcatcgccgccggcttcctcggcctgacctcggggatgccggtggagaagatcgtcaaatccttccaggacggcttcggcggcgtgctcggcttcgtcggcgtgatcctcgccctgggcaccatgctcggcaagctgatggccgattccggcggcgccgaccagatcgcccgcaccctgatccgcgccttcggcaaggagcgggtgcactggtcgatgatgctcgccgcgttcctggtgggcatcccgctgttcttcgagatcggcttcatcctgctgatcccgctggtgttcatcgtcgcccggcgcagcggcgtgtccctgatcaagatcggcatcccgttgctcgccggcctttccgcggtgcacggtctggtgccgccgcatcccggcccgctgctggcgatcggcgtgttcggcgccgacatcggcaagaccatcctctacggcctgatcgtcgccctgcccaccgccgccatcgccggcccgctgttcggcgcgctggtctcgcgctacatacccggcacgccatcggcggaactggtcgagcagatcgcccacgagcccgagacccaggacctgcccagcttcggcgtgaccctggcgaccgtgctgctgccggtgttcctgatgctgctgaagaccttcgccgacgtcgccttccccgatggccacgcgttccgcgcctggatggacatgatcggccatccgatcagcgccctgctcctggccctgctggtggcgctctataccttcggctacgcccgtggcttcgactcgaagaagatcctcaggctgctcgaccagagcctggcaccgaccgccgccatcgtgatgatcatcggcgccggcggcggcttcaagcagatgctggtggccagcggggtcggcgacgtcatcggccatctcgcggtgaacgcgcagatctcgccgatcctgctggcctggctggtggccgcggtgatccgcatcgccaccggctcggccaccgtcgccaccatcaccggggccggcatcgtggtgccggtgatcgacctgattcccggcgtcaaccgcgagttgctggtgctcgccaccggcgccggctcgctgatcctctcccatgtcaacgacgccgggttctggctggtcaagcagtacttcaacatgagcgtcagcgagaccttcaagacctggaccgcgatggagaccatcctctccgtggtcggcctggtcttcatcctgttgctgtcgctggtgctctga

SEQ ID NO: 863 - DNA, 441 bp, Pseudomonas aeruginosa
atgtccgagacctttaccaaaggcatggccaggaacatctatttcggcgggagtgtgttcttcatcctgctgttcctggccctgacctaccacaccgagaagaccctgcccgagcgcaccaacgaggccgcgatgagcgccgcggtggtgcgcggcaagctggtctgggaacagaacaactgcgtcggctgccacaccctgctcggcgagggcgcctacttcgcgccggagctgggcaacgtggtcggacgccgtggcggcgaggagggcttcaacaccttcctccaggcctggatgaatatccagccgctgaacgtgccgggccgccgcgccatgccgcagttccatctcagcgagggccaggtcgacgacctggccgagttcctcaagtggagctcgaagatcgataccaaccaatggccgccgaacaaggagggttga

SEQ ID NO: 864 - DNA, 1401 bp, Pseudomonas aeruginosa
atgatgtcgcccaatggctccctgaaattcgcctcgcaggcggtcgccaaaccctacttcgtgttcgccctgatcctcttcgtcgggcagatcctgttcggcctgatcatgggcctgcagtacgtggtcggcgacttcctgttcccggcgatccccttcaacgtcgcgcgcatggtgcacaccaacctgctgatcgtctggctgctgttcggcttcatgggcgctgcctactacctggtgccggaggagagcgactgcgagctgtacagcccgaagctggcctggatcctgttctgggtattcgccgccgccggcgtgctgaccatcctcggctacctgctggtgccctacgccggcctggccaggctcaccggcaacgaactgtggccgaccatgggccgcgagttcctcgaacagccgaccatcagcaaggcgggcatcgtgatcgtcgccctgggcttcctgttcaacgtcggcatgaccgtgctgcgcgggcgcaagaccgccatcagcatggtcctgatgaccggcctgatcggcctcgccctgctgttcctgttctccttctacaacccggaaaacctcacccgcgacaagttctactggtggtgggtggtgcacctgtgggtggaaggcgtgtgggaactgatcatgggtgcgatcctcgccttcgtgctggtgaagatcaccggggtcgaccgcgaggtgatcgagaagtggctctacgtgatcatcgccatggcgctgatcagcggcatcatcggcaccggccaccactacttctggatcggcgtgcccggctactggctgtggctcggctcggtattctcggcgctggagccgctgccgttcttcgccatggtgctgttcgccttcaacaccatcaaccgccgccgccgccgcgactatccgaaccgcgcggtcgcgctgtgggccatgggcaccacagtgatggccttcctcggcgcgggagtgtggggcttcatgcataccctggcgccggtcaactactacacccacggcacccagctcaccgccgcccacggccacatggccttctatggcgcctacgcgatgatcgtgatgaccatcatctcctacgccatgccgcgcctgcgcgggatcggcgaggcgatggacaaccgctcgcaggtcctggagatgtggggcttctggctgatgaccgtggcgatggtgttcatcaccctgttcctctccgcggccggggtgctgcaggtctggctgcaacggatgccggcggacggcgcggcgatgaccttcatggccacccaggaccagctggcgatcttctactggctgcgcgaaggcgccggggtggtgttcctcatcggcctggtcgcctacctgctgagcttccggcgcggcaaggcggccgcctga

SEQ ID NO: 865 - DNA, 30 bp, Artificial Sequence
  PRIMER
gtaacggctcaccaaggcgacgatccctag

SEQ ID NO: 866 - DNA, 31 bp, Artificial Sequence
  PRIMER
cttcgccaccggtattcctccagatctctac

SEQ ID NO: 867 - DNA, 27 bp, Artificial Sequence
  PRIMER
agcgcctttgtcgcggcggcctgtgga

SEQ ID NO: 868 - DNA, 30 bp, Artificial Sequence
  PRIMER
gttgatcagcgggccgagtacgttgaacag

SEQ ID NO: 869 - DNA, 30 bp, Artificial Sequence
  PRIMER
gtcgtggacagtcattcatctaggccagca

SEQ ID NO: 870 - DNA, 30 bp, Artificial Sequence
  PRIMER
ctccatagggcagggtgccaggtaacgcct

SEQ ID NO: 871 - DNA, 31 bp, Artificial Sequence
  PRIMER
tttcctgtgaccttacggcctgttcatcctg

SEQ ID NO: 872 - DNA, 30 bp, Artificial Sequence
  PRIMER
agcaggacacgccaggatggtgttacaagg

SEQ ID NO: 873 - DNA, 30 bp, Artificial Sequence
  PRIMER
tacgagcgataacgtcgcgctgctgttccg

SEQ ID NO: 874 - DNA, 30 bp, Artificial Sequence
  PRIMER
gctgaattccttctggctgctggacagcga

What is claimed is:

1. A method of modifying a phenotypic characteristic of a microorganism, comprising culturing said microorganism in a low sedimental shear environment and harvesting said microorganism from the culture.

2. The method of claim 1, wherein said low sedimental shear environment is spaceflight.

3. The method of claim 2, wherein said low sedimental shear environment is provided by a rotating wall vessel bioreactor.

4. The method of claim 1, wherein said microorganism is selected from bacteria, fungi, viruses, protozoa, protists and worms.

5. The method of claim 4, wherein said microorganism is selected from the group consisting of Salmonella sp., Streptococcus pneumoniae, Pseudomonas aeruginosa, Candida albicans, and Saccharomyces cerevisiae.

6. The method of claim 1, wherein said phenotypic characteristic of said microorganism is selected from the group consisting of virulence, immunogenicity, stress resistance, resistance to a drug or disinfectant, and biofilm formation in culture.

7. The method of claim 1, wherein the virulence of said microorganism is increased as a result of the culturing.

8. The method of claim 1, wherein the immunogenicity of said microorganism is increased as a result of the culturing.

9. The method of claim 1, wherein the stress resistance of said microorganism is altered as a result of the culturing.

10. The method of claim 1, wherein biofilm formation in culture by said microorganism is increased as a result of the culturing.

11. The method of claim 1, wherein the fluid shear level in said environment is adjusted to be 100 dynes per cm² or lower.

12. A method of modifying a phenotypic characteristic of a microorganism in a low sedimental shear environment, comprising altering the concentrations of one or more ions to which said microorganism is exposed to in said environment.

13. The method of claim 12, wherein said low sedimental shear environment is spaceflight.

14. The method of claim 12, wherein said low sedimental shear environment is provided by a rotating wall vessel bioreactor.

15. The method of claim 12, wherein said low sedimental shear environment is an environment within a host during infection by said microorganism.

16. The method of claim 12, wherein said ions are selected from the group consisting of phosphate, chloride, sulfate/sulfur, bromide, nitrate-n, o-phosphate, pH/hydrogen ion, calcium, chromium, copper, iron, lithium, fluoride, magnesium, manganese, molybdenum, nickel, potassium, sodium and zincions.

17. The method of claim 12, wherein said microorganism is selected from bacteria, fungi, viruses, protozoa, protists and worms.

18. The method of claim 17, wherein said microorganism is selected from the group consisting of Salmonella sp., Streptococcus pneumoniae, Pseudomonas aeruginosa, Candida albicans, and Saccharomyces cerevisiae.

19. The method of claim 12, wherein said phenotypic characteristic of said microorganism is selected from the group consisting of virulence, immunogenicity, stress resistance, resistance to a drug, and biofilm formation in culture.

20. A microorganism harvested from a culture of said microorganism grown in a low sedimental shear environment.

21. The microorganism of claim 20, wherein said low sedimental shear environment is spaceflight or provided by a rotating wall vessel bioreactor.

22. The microorganism of claim 20, wherein said microorganism is selected from bacteria, fungi, viruses, protozoa, protists and worms.

23. The microorganism of claim 22, wherein said microorganism is selected from the group consisting of Salmonella sp., Streptococcus pneumoniae, Pseudomonas aeruginosa, Candida albicans, and Saccharomyces cerevisiae.

24. The microorganism of claim 20, wherein said microorganism is an attenuated vaccine strain.

25. A therapeutic composition comprising the microorganism according to any one of claims 20-24.

26. A method of identifying a gene of a microorganism which modulates the response of said microorganism to a low sedimental shear environment, comprising culturing said microorganism a low sedimental shear environment, comparing expression of candidate genes in said microorganism in said low sedimental shear environment relative to control sedimental shear environment, identifying said gene based on differential expression of said gene.

27. The method of claim 26, wherein said low sedimental shear environment is a spaceflight or provided by a rotating wall vessel bioreactor.

28. The method of claim 1, wherein said gene is selected from the group consisting of virulence genes, iron metabolism genes, ion response or utilization genes, cell surface polysaccharide genes, protein secretion genes, flagellar genes, stress genes, genes coding for ribosomal proteins, genes coding for fimbrial proteins, transcriptional regulator genes, genes involved in extracellular matrix/biofilm synthesis, stress response genes, sigma factors, genes encoding RNA binding proteins, genes encoding small noncoding regulatory RNAs (small RNAs), DNA polymerase genes, RNA polymerase genes, plasmid transfer/conjugation genes, genes encoding chaperone proteins, carbon utilization genes, metabolic pathway genes, energy metabolism genes, chemotaxis genes, genes encoding heat shock proteins, genes encoding putative proteins, genes encoding recombination proteins, genes encoding transport system proteins, genes encoding membrane proteins, genes encoding cell wall components (including LPS), housekeeping genes, genes encoding structural proteins and enzymes, and plasmid genes.

29. The method of claim 28, wherein said gene encodes a small regulatory RNA binding protein or a regulatory RNA.

30. The method of claim 26, wherein gene expression is determined in a microarray analysis of mRNA, RT-PCR, qRT-PCR, Western blot analysis, and proteomic analysis.

31. The method of claim 26, further determining whether said gene is involved in establishing infection of said microorganism by generating a mutant microorganism which comprises an inactivating mutation in said gene, and assessing the infectivity of said mutant microorganism in a host.

32. The method of claim 31, wherein said host is selected from the group consisting of an animal or an animal analog, a plant, and a cell or tissue culture.

33. A vaccine composition comprising a microorganism which has been modified by inactivating a gene involved in establishing infection, wherein said gene has been identified according to the method of claim 31.

34. The vaccine composition of claim 33, wherein said microorganism is Salmonella sp., and said gene is Hfq.

35. A method of assessing the efficacy of a candidate compound against infection by a microorganism, comprising culturing said microorganism in a low sedimental shear environment, contacting said microorganism in the culture with said compound, and determining the inhibitory effect of said compound on the growth of said microorganism as indicative of the therapeutic efficacy of said compound.

36. A method of assessing interactions between a host and a microorganism pathogen or an attenuated vaccine strain, comprising placing said host in contact with said microorganism pathogen or said attenuated vaccine strain in a low sedimental shear environment, and evaluating interactions between said host and said microorganism pathogen or said attenuated vaccine strain in said environment.

37. The method of claim 36, wherein said microorganism pathogen has been cultured in said environment prior to said contact.

38. The method of claim 36, wherein said attenuated vaccine strain is a recombinant attenuated vaccine strain.

39. The method of claim 36, wherein said host is selected from the group consisting of animals, animal analogs, plants, and cell and/or tissue cultures from animals, animal analogs or plants.
